United States Patent Application Publication US 2026/0191916 A1 - sequence listing, part 53

SEQ ID NO: 248 - DNA, 3195144 bp, Bacteroides thetaiotaomicron (residues 1,597,573-3,195,144 of 3,195,144)
  source 1..3195144: mol_type = genomic DNA
tttcctctctaagctaaattccattatctccgaatgttccagcttatacaatgtaaagcaccaccttcctctgctacttcagccatttcaatttgatgaatctcgcaatcagggaatgcttcatgtaaatattgccaagcaatagcatcctcattaatattgaatattggcatgataatcttgttaccgacttgcaggaaattgatgtaagcccaatttaagtctgtccgtggcgaaccaaccttgttcgcaaatcgcatctctgtgacttcaaagccatatttttcaagaatgtgtcggatagcagcagcttcttccgggtattgatctccatgattacccatcaggatactgttgccaccacaccatttgacaaacccatccgaatgaccgtacttgtctgtatcacgagcattaaagtcaccgtgcattttccatggaattataatcacgggatgtccaagttctgactccaactcagctttgaacactgtatcctctttttctttaccattctctgtaaacaccttatccgtcatcacaatataagggccacatgggaccatatttccgccgtcaattattagctttgttgaacgacagtttatccccattccacgtagtacattagtacattcggttcttgtttcagcatcctctggattgttgctcttcattagatagtccggataatattggtacttcaagaactcattctcattcaactgaataggcatgtagtcgcgtgcccaataatctctggtacatttcaactctttgggttctatgtcgcaattcttcagaagattagtcagacgctggtaaaattccggatgtccatccttcttatccttcagccagggtgacaaatagacttcatttgtttcactgtcatgtagcaactggtcacaccgcacatatctgtatcgcttatccttaaaagaggaaaacgcttcgtgtaactctgttcggtctggatgtgatagatattctccaagtatataatccactttactttcaatagtctgcttaccggttagaagattcaatctgggtttacagatatatccaatcataccgttatttcgctctacaagaaaagggaaattattgtcctgttctaaggcatgatgaagtctgaacagctctgcacaagcccaggggccttctaaaatatcgcttttatcctcgctgactaactgacggatcagaatgcctccaaagtaagagctatcatccaatatatacttatctacttttttcccagtgctgtcaatcccatcctttttacaaatctcacttgggaaattcaaatcaatacctccaaagtcattcacgtaccagtataaagaatcggagaaacggggatgagtgataatgtcacgatgatgcttattgtagaagtaaaactcaatctctttaaaaagatagattttttctcccttttgtattgcaaaattttcaaacagcaatttggctatttgagtaaatcgtgactctatctctgctgcattcatttcaccattcagagacattagctctttgaattttgttgttatcatcatcatttattatttcctgtattaataccctaatatccacttcatatcatcataaggacgccatttacagaagagcgtctcgatataaagtaccataccaaactgatatgttgaaagtttttgggcaagttcttttttatccttacttaatgacttcatgatcttttccgcatattgtctccagtattcaatatcaatgtgctccttacagaacatcatctctccataccaaaacctacccttaacatcatccttccattgatcgggacacttatcttctccttggtaatatttacataaagaggtgtagctatccgcttcatatatgccttttattttacgtaatccgcaactttcagttagtgcacacgataaagcctggcagaaatctttccacgatcgttcaccagataactgtgtatcagttatcatccaattttctccttcatgtttcaatttgaatcgaccaatcaagcatttacttctgtaaacatacatccaaccatcatctaagtataggccatatctgttatcccaaccggtgggagaacatctcaaaatgagtcgatgttcctccttcgtaaaacttattctatcaaataaattcagaacactctgccaatgatgccattctacattagttaaggcattgtttttcggataaaatgaacggaacttattatcacggtcatacattgcccaaaagacagaagagtcgtattttaagcgtttgataaggtctaatatattaaaaccgtgtaatatttcattgccttttacaaacttcttcttaattatattaaactgacatccatacatcgcacttgcaaatgaagccgtcaacatagcaatcaaatgcctgtcgccatcccatttcatagcgttatgaatggatgaagtaaaatcaaatcccctataaaaggaatcccatgcacgaaatacatatatgagaagaccattaaatgctttattggtagaaattccatcaagaggcttccatttacatttccaagatttaataatactctcaaaagattcaacagaatgaaacacttcactcttagttttcccttgtctcagccctctaataatgtccacgacaaacaagcgggcgtaaaattcctctttatctgtatatggagcatagtttagccctttaggatagtccaaattatcattccatgcagacatgagttgccacataagccactgcccggttacagaaagtaaatcggttggagaataatctgtaatatcaagagtataagtctcacgatttgataaagcagacagattccaacttgccgcctgcatataagcacggccaaactcagacaaacttactttgtcatcgtaagatatgagctgattccagaacgcttctctatcatgttcatacgtccacgcggctatgtccccaattattgctcctatcattagctaatattattttgtcaatttacatatttctacactctcttcagtggtggaaaaccgagctacaccatctaagtagaacaaaattaatattgaaaggaagtccctaacacataaactcgtgcttagtaaaatccatacgaagcttcctggtctgccttcattatgcaacgaaaagcctccatgacaggccatcaagcttcaaagacaggcaaaggactttgcaataagccttcttctaaggtcattctaccaagctatgaaacgcttatctaggtttctattggcaaagtcttcatcttttcataaagaatctgagctatttcaatatcctcttggtttattttcataatgctttgaaatcttactcttgtgaaaaatcagacaacttatcccagtctaccttgaaatcaggattctggctttccatccactttaaatactgggaatctgccaagaatacactttgcagtgttttccctttgtacttaccaaaggagattacatcatctggctgtagaatctttattttccctttatgatactctacaatagcatctatatcggcaattaaacgttgagaatcaataattgcccatttcacataattccagtcagtgtcgataacttctttaatggtcttatccttatatttaccaaaagtgaatatatcatccagtccaagcactttaacctcattcccctctataggttcaccttgtatatctaaaaggaaccaggaaccgcaaccgcaacatggaatctcttttggctctgtatcgtcttttttacaccatgaattttccggtgaatcagaactatcagccctttctccattacgaaaatagtaaccatagacttttccgtattttccgaatctcccatgtggctcaactttaacaacttgaacatattgatttctataccagtctgatactctaccatctggaaatctttgtgctgtgaatggtagaattctaccaatgttataataaatttctgtcagattattttgaggaaacttgcaatttacagcatctataagcttctggttattattcatggcattatatttaattatttattctccattcaaacaattctctatccgttattatcggataatcaaaccgttcaatcaattccctctcagtgaaggctcttttgaatgtgttacctaacaatagaacaatcatatcgtccattatattgttacagttgttgatttcaggatgatataagttttggacgacattaattccaatatatgttcctgttcgtttatccaacttaacagaaagcatattctcaaagtcttctattgctattctgtagcgaagtagtatcgtcaaaagttgctccctatctgaatcagtctggaaatgtttcaacaaatgctccatcttccatttttcttcagttgtctgacatagcttttgtttcaaaagagtaagatcagcattactaaattcagaatgagacaagacatctttattttcagaattaagaaaaacgcttcctattatatcaaatggttcaaacatgcaggattccagacccaaataagcacgaataacagaagttacccgaagaatccttacttgattatcccatggcaagtttttgaatgggacagtatcgtttaccatccaagcaattttcacatattcatttataagcctatgagcattccaagatgcgcaaccgcaagatagaatgttgttaaattgtccaacgttcatattattgtacttttaaagctattcatatgcaaagattgaaccaatctatgcagcctatctgcattttaaacggaaatctccataatttgcaaccattaaatcaatagcaaagataagaaaatcaactcaggaattgtcgttataatcatttttttgagttatatcactcatttattctattattagaatattatttcggataattacattacttttgtatctataagtgtaaccaaaaaaaatgaaatatgggtaaagatttaaatcgcctaaaagtggttcttgctgaaaaaaagaagacaaacaaatggcttgccgaacaattaggtaaagatccggcaacaatatctaaatggtgcaccaacagtgcccaacccaacttagagaatttagttgaaatagccaaatgccttgaagttacagtaaatgatttaattcgttaatattagattaagcccaatatgccaacaaataaaaatgctgcgatacgttaccagactctcgataaatgctttcgggatcgacggcataagtattacatcgaggatctcattgataaatgtgatgaagccatttactattataatgggattggaggtgtaagccgtcgccagatatttgaagacattaagtttatggagagtgaaacaggatggagtgtgcctcttgaaagaaagcaggatggcagaagggtttactatcgttacagtgacccaaacttcactattaatgctcaaccattgactgaagaggaagccactcaactacgttccgttatcatcacgcttaaccgttttaaaggactgcccagcaacgaatgggttgaagaagttatttccaatcttgaatggcgattcggccttagggaaaaaaacgaaaacattcttggtttcgaacaaaatccttatttgaaaggtctgaacttcttatctgacattatagatgcggccattaatcatcaggccataagaatcatatatcgtaattacaagaattatgataacgagcgcaatgtcattgttcatccttggtacataaagcagtataataaccgctggtttcttatggcttacgatgcggaagcaaatcgtatctccaattttgctcttgaccgtatccaggaaataggtatcgaggaggatgttgactttatctcaaatgatcagatagattttgagcattattttgatgacgtatttggagttactattccgcccgatgacgtggaaaagataagtgttgttcttcaattttctaaaagacagtatccctatatcgtttctaagccgatacatcatacacagaaaatcattgatgatgaagaatgtatcttgtccgtagagctacggcctacttacgaatttactcaactgattctgtcgttcggctatgatgtcaaggtgcttgaacctgagacatacaaacaagaaataataacaaatatacgtaggaatttgcagaattatgatataatgcagatagactgcaccagtcaagaacaattttgtaagaaacaaagcaatgaataaaaaaaatagtccatatacagcagccatcacgggtggaggtttcctttttgaggagaccaatatcctattacctctactccgtgcaaccaatagtgaggagttgcttcatgatgagaaggtgaataatcggttgcttcacattaatgcagaaagttctcgtaagaaagctattctggaaatcaaacgaagatatgagtctatgccatcttctttttgggatgactttcttgaaatgagcgatacagacaagatagtagctatcttctatgttattttgaggacttataagatctgtttcgattttcatgtaaatgttgcaataaaaaaatggaacagcatatccaaaagcatcgataaaaatgacattatgatggagttcaacgaaatagcatcaaaagatgagtttgttgactcatggagcgataataccaaagataaagtggcttctgcatatcttacaatacttcgtaaagtgggtatgcttgacaatagcaaccatcttaatgcgatttcctgtagcaatttctcttactatttgggaaaagggcaaccatggtttttggaagcctgtcttttgcaaccttatgaaatagagaacataaagaaaacaatgatatgaccataaaagagcttgatgataaattgaatagtccgggattccaagatacggaaaatggcgacttgttttataactttttcatctaccagtatccggcagagaaagagtatgacattcgtaagcagatacaggagtttaaagcgaatctgatccgtcccacaaactatgtggatgtgcttacactgaatctgtttgatgagttttgcagcttcctcgaccagaagaaatttctgcgtcatccttctatgttgaaatatctgatggaaaaagaacagagtgacccgtcaaaggcaaagagcacacaggatacgcttgcccgcaatgcccattcaccagaattcgttcaatttatacatcaacgtatcatcgatcatatcacaatcaaagaccaatatcgtcgtccctacgtttttatgtatggtataggcagtatgtatccttatctgagggtcaatgaattcttggctctttatgaagattacaacgaaacggacaaatataaaatcattgtcttttatccgggtcatcgtgatcagaactcattccggctatttgatacacttccggacaatcatacatatcgtgccactcttttaataaacgaataagctaatgaaactgaaagaattatataataagcctattgaccgtgcagtgaatcctgctgtcagcgctaccaagtttgacccggaaacagaacgtatagaaatacaggaatacgtgtttacggacgagattatgaacggtcttttccgtattttagatgctatcaagaataaccaaccatacgatcacgtgggtatatggattgacggttattatggctcaggaaaatcacattttctgaaatatctggattactgtatcacaccttctactcgtgaagatgctttatcacgtctgctcgaagcaataaaggctatcgacccgcttgatgacaaacattatctgagcttcgactacgagcagatggtttctatcgccaattggttggaacgggccacgatagatacatgtatcttcaatctggaaacaagctatgacaactctaccgacaagaagaaagcttttctgcatgtcttctggaatgagtttaatggcaagcgtggcttcaataagttcaatatcacacttgcacagaatcttgaaaaaccattggaagaaaaaggagtgtttgaggcattcaaacaacgcatcgcagaggaaggtggtgattggaatgaccctggtatggctgccgatttgattgacaacgaactcgattgggttcttgacattgccaaagaactggcaccaacactttccgtagatagtattcgtgaacgtatcatcaagcgtgatacgaacatgagtatagaccgttttggtttggaactggcatcatatcttaaagacaagggcgatgattaccgcctgattttccttgccgatgaagtttcacagttcatcaacaaggagcgtgaccgttatcttaaccttcaggaaatcattacgaaactgtctgaagcttgtgataacaaggtctgggtggcttgtacagcacagcaagacctctccgagattatggacgactgtcatatagccgaggagaaagataaagaaggtaaaattaagggacgctttgaagtgaaggtatccctcaaaggaacacaaccggaagtgattactcagaaacgtattctcgacaagaaagaagaagtaaaagatacgttggcctcactttataacaaatacaaggccggattcgacttgcagttcaaacttccaaactcatacagcagttacgactcgcaggatgatttcatagactattacccttttgtcccctaccagttcaaactcatcatgcaggtgttcaattcgttcctgaacttaggctatgtggcaaaagaagtaaaaggtaatgagcgaagcatcatcaaggtaatccactctaccgccaaggctaatgccgatgctgaattgggtaaattcatttcattcgatgaactctataacaatatgtttgaggaaggtttgcaggctcgtggacagaaagctgtggacaatgccctccgtatggcacgctcctaccagacagataaaccggaaaagactcgtctggcggttcgtgtagttaatgtgcttttcatgatctgcaacatttcccaaaccgaccagttgctgttccctgcaactgtggataatgtgacctctcttcttgtaaataatatggatactcctcgtatgaccatcaagaatgaggtggagaaaattttagagttcctttgcgataataatattattcgccgtgaacagggtaaacagggagctcctgacacattcactttctatagtgaggaggaaatgaaagtggcgcagctcatccaaagccaggtggtggacaacaatacccaggcagaacagctgaaagatatttttaataaatatattacagctctcaggaataaagagcaatataaaacacgcagtttctccgttgggctgaccataaagcagcgtaccttcctgagtaataaccctgatgtaatggtagagtttatgatggaccccgactatgatactgctgagcagcttgcattgcagaacagcaatactaaccgaatggtatattatgtaggtcctcaatatcgtgagaacagacgtttgtacaacgccttttactggtactgtcaggcagaacgttatatgtccactcccgtcccaaacgaggataatgccaatactcgtaaagaatttgccaagcgagccgaggaactttacgaaggacttattaaaaaagagtttgaaaagattcttgatacctgtcctattgtttccggactatatgtgattgacgaagcagagcttggacagaaacgaggtaatgaccgttatcgtgttgccatcgagaagcatttggcaggaatctaccctaaagcaaatctcgttgattctccaagtattccacgcactacagaacaattgaagaaagctatactgcgtaatgtgaatcccggcgattacgaaggtatgggggcgattcttacagatgctgaacacgaagtggaaatctatcttaataaacagtttgcagaggtaaatgtgactgatgtgcttaccaaattctcaaaagctccatatggatgggacaatatctgtaccctttatgtgattaatgaactggtacgtcgtcacaaccgtgactacgcttacgccaataatcccaatgtagaaacgtctacagtggccaaccgtattgtgacagagagtaataagtttacactccgtcaggcacaggtcacttcaccgcaggtaattcagaaattcatagctgcctggaaggaaatattcggtatttcttccgctccgacaactacagacagcacccaactattccgcatgtgtcgtgacatagagagtgagcgtagcctgtccaaattgataaaaggctataaggacatagaacaacagattatagcttatccttttgtggaaccaatccgtaaggccatagatctcttcgaatcatggcttgatgaacgtgatccgttgaaattcttcaatctcatcatctcatcaaaggatgaagccaggatgcttaccgacaaatgcaaagaggtggtacaatttacccatgatcaactctctacctataaacagctcatacagttcgctgatgagaatacatataacttctcatttgttccggaagagatgataggagctgttgatgagttcctaaaagtgaaggatgacccttggccaatgggtaacacattccgtggctatataaaattgaggaatcagctttccggcagtttggacgatgtgcgaaatcaacttcgcgataaaattaaagcggcttataacgatatttttgactatctgttacaagtggccgagaagcagaatgtcccggcaagtgtactttccgaccgtgaagcaaccatacagcttaaaactgctccaacaaatatcctggtactgagaaacaatatccttaccgatgtattctatcaggagcaggtgaacaagattatgtcgtatattcctcctaagcctactaaaaaggacaatgatgaagttgatcctccaacacctcctgtacgagaaaagagaattcgccaggcatcattgcaaacaaggacaaagttgcctattacgaacgaagaagacatagaccgttatcttgaaggtttgcgtcaacagattgaacgtctgcttgtcgaccatgacggagtgatgattattaaataaagattaccaatagattatatggacaccaatagaataaaacgcttcgctaccgaagctcgcaatatattaaaagccggcattgcagctaagataactacacttggcttcaacaagaaaggtaatgtagctgaagagcaccgtccacaactgatgcaaggaggtactctttggaacggacaattttatacagagggattctaccatcagtggatgtccctctataatcgtattcagcaaaaaggcatcaacgaagtgtatgaggaggcagcctatacgtggttcaaccgtctgtgtgccattcgtattctgcagaagaataatctctgttctcctgtacttcagtatgctgatgctgcacgtaccccgattattgtggacgaagcgcgccaaggacatcttcctcagatgaaagaagacattcgccagcgcattgtagaactactggatgacgatacaaaggtaacagaacagtttgccttgcttattactgcttggtgtcacgataatcccatcctcaatcagtgtttcggttctatggccgactataccgagctacttcttccgaacgatattctggctaaaggtaaattcatggatatgctgaaccatactgaatttattaccgatgaagagtttcagtctccggaactaattggttggctctatcagttctatatatcagagcgtaaagacgaagtttttgcaaagaaaggaaaattcgaggctgacgaaataccggcagctacacagatattcacacccaattggatagtgaaatatatggtgcagaacacagtgggtcgcatctatctggataataatccctatgaaacaacacttcaaaagaagtggcgatacttagtgaaccagacagaaaaaccgactccagaaaatttactgaaatacaacgagcttaccgacctgaaggttgccgatttggcctgcggttctggacacattctaaacgagtgcttcgacttgttttatgacctttatattgctgaaggctatggccgtggtgaagccattgaaaacattttccgtcataaccttacaggtattgacttggataatcgtgcaaaacaattagcaacttttgcccttttgttgaaagcatgccaaaaggattcatcttttgctgatgcgcattgcttgccgaatatactgaccatgccgaaaccatggaatgaagaaacggatgaaaacttaaatgatttcctttctctttatttccagggagagaacacttcttcacaaaatgaagaacttgccgcttgctttgaactgatgcataatgcagactcgctgggttctatcatgaaattcgacattagcgacagcacaagattactggttaaacagactactgattactggtgcaatcaagagattatgcccgatgccgtgcgcttgcaacttccagcttttgagctaattttggctttgacggagaagtatgacgctttggtaatgaatccgccgtatatgggtggtggcaacatgaatgaggtgctgagtaagtatgtgaaggcaaattatgaagaaggcaaaggagatttattctccacctttatgttgttggctattgacagacttgcagacaacggcaaatatagcatgattaacatgcagagctggatgttcctttcttcattcgaaaaactacgcacgtctttactcaagaactatcatattgaaaacatgcttcacttgggccctcgaactttcgatgagctgagtggtgaggtggtgcaaaacacttcctttgttgtagctaaaaataagtctgatgaaggtggtgtgtatttccgactggtagatggtaagaattgcgcagagaagaaagatatgttcctccaggcattgcaggaacatacagccaaggtgtattacccaaatgtccctcaatctaactttgagaaaatcccgggatgtccgattggttattgggtttcacccaatatcttaaaaatatttacatcaaatctcgcattgtcagcagtttgcagcccaacacaggggctggcaactgctgacaatgcgagatttctccgcagctggttcgaggtcagccgaagccgtataggcttcggcttcgaaaatgccgcgtcagcggctcgatccagattaaaatggttcccatataataaaggtggagatgttagacgttggtacggtttgagcctcagtgaaaacatcattgattggtataacgatggagaaatattaaaatcatttaaacctgctgttataagaaatcccggatattatttcacagatggaataacttttccaagaattggttcaaatctattttatgcaaggatattacaacctggatttatctttgactgtaatggcccttcttgcttcccacaagaaaagaaggagtatattttgggcttcctaaactcaaaggttatgcagcaattgctatttatattatgtccaactctatcttttcaaattggagattctttcaaagtaccatatataggaaaaaataatgattatataaatcattgtgttcaacaaaacatcaacatttccaaacaagattgggacaatcatgaaacctcatgggacttcgaaactaatcccctattagctgtaaacgagaacacctatatcgacaatatccgccacgaggaaaagctgcacgaaaaagaaacagacaaacacatctgtatcaatcctgccgcaccgcaacttggcagtctgaaatggcgtatggagcaatacaagacaaagtgggaacacctcttcatgcagcttcacgagaacgaagaagagctcaaccgtcagttcattgacatatacggtctgcaagatgagcttacaccagatgttacactctctgagataaccattctgcaacaaggagaaatcaatattgcagatgacagtctcagttggaacgacgaagtattgatgaagcaacttattagctttgctgtaggttgtatgttgggacgctatcgtcttgataagccaggattgcatatcgctcaccccaatcctactgatgaggaaactgcttcttacacatttaacggacagtcttgggaaattgatgacgacggcattatgccgctgatggcaaatgattgcggattcagtgacaacgcatcatatcgtttcgctgatttcctacgtgtggtactgggtgaagaacttcatgtggagaatcttaactacgtggagcaatgtttaggtaagaccatagagcaatatttcgtaaaggacttttggaaagaccataaaaagatgtatcagaaccgtccaatctattggctatttgcatcaaagaaaggttccttccaagtaatagcttacatgcaccgtatgaatgcctatacagttgagcgcatccgagcaaaatatctcctccccttcattgaacatctggaacaggaaatcaacaaacttgacttgcgtcgggcagaacttacgactaaagaaagcaaacagctccaaacgcttcagaagcaattggatgaatgtcgtgaatatcacgaacgtttgcaggttgtagcagagcaggccatcagcttcaatcttgacgatggtgtcacagtgaattatgctaagttcggagacgttttacagaaaatcaaataaccttaataaacacctaattataagatatttaatatggcaataccaaatataatagaatgtggaatttgttctctgttacccgtgaactcaaataatgtttggtttatagaagaactattccgctacgaagacgtaaagaaatactatgttttacgtaaagatcatgctgaaaacataaaggccttttgcagatatattgttaatgcaaatatccaaagagagtcattaaactttatcattttcaataataatggtgaagaggttggttttatctcagcagaacctgtcatgaaccgaacaactaatatgcctgtgtggaatgtagggtatgcagttcatccctctcatcgacaccacggttatgcttcatcagcattgaatggactaacgaatttcctcctacaaaacttttcattccaacaagtaatcttggatattagtatggataatgagccttctcagagagttgctgaaaaatgtggttttacaaaaccaaatgatagaaccggaattatcgatattgaacatatggaagtaggaatgcgattgaaatggtataaacaactttcaggtaacagaactgtgtattttaaccaagcagttcactactacaggcaaaagttatatacagaatcaatagatgcattccaaaaagctttgaatgaaccatacattcccaatacgccatttacagacgctcagatttattcaaatatgggtatggcactctcgtctgtaagacggtatagagaggcttttcaaagccttaaaaaagcgcaaagtttaggtttaaataatccaagcattgaaaaggaattacgttggttgagagataatgtaggcctattctgataaaataacaatacgaaaggagaatatatatggcaacaataacaatcattccttctgtgagactttatagaacaggagtaaaaacgacacaagctgatggcagcataaaaagtatagccctgcaccaaggaagtcttgacggtgcatgcgctgtttatagtacaatcatctctttgatgtgccttcagcaaatcaacattgaggatgtaaattcatactccggaaatgtggacaagcgtagtccgaaaggaaaatttcttagcaaacttctagaacaacgcggtatgaatatgtccgggtggaatcttaaaactatggcacaggaaattagtaatacatccgacttcaatataaaagccacagctattcggaaagattatattgaccgcatttacgacaatattcatcagaatagtcctgcaattttagggatttcttttaataatcagaatttcggacacgccattgtctgcattggtgtggaagaatccgatgagttcgaagatactccaactaaattgttttgcatagatccgggctttctcatctcgaacacgtcatactggaattgtatgattatgcttcccaaaaagtatgatgacaacaccgagctaacctatgtagttggtgatgatactcggaaaataatgcttgacgatgtcatagtgtttgattaaacgaatatcataatagttctcgaattgccaagaacggatatttactttatataataaaaatctgatagaataaacattaataaaataataacaatagaatctgcaaataaaaaataacatgtctgatattataacattagcatctggtgcagtaattatattggttttcttactcttttgttttgaagaaagaaaactttatagcatcaaggaaattttagtaaaacttgttaatagtgagaatatcttggattcattaaacaattccaagatagcttcgcttggggaaaaatatgaaaaaactattatcgtaaatacaaaagacgggaaaaagtcaaatatacctgcatctgaatttatatatgacaacagcgtgtgtaaatgcaacaaggtaaatttacgtatgcttgatacagcatcaggtacgcttgtcggtttaggacttcttggcactttccttggcttaactttgggtattcaaggatttgacagtagtaacacagataaaatcaatgaaagtattcagggattattgaatggtatgggcacagcgttcctgacatctcttcttggtatgtttctgtctattgtatttacatttatagataaatcattaagacatagattgtataaaaacgtaaatggactgacagaaaagctagatgccctttattatattgatgacatagcattggccaatcttaatcagcagaatataattgaccgactttacaatgcactaaagtccgattttcaggtacaaaccaataccataaaagactcctttaatgagcttagtggaaaactatcatacacaaacgaatctggagttatcatacctgtggccaacgctgtacgagaaattctttctgagaacgcccagcaaacaaaagctctaaaatcattctctactgacctggctatagaacttaatcaaggatttgatgagactctctcacgacagatgcaacaaaaaattcttccgttaatggaaagtgtcgatgcaaccactaaaaccgttgttgaacatattgatcaaatggcgaaaactgtatcttctccggcaagcgacatgatgcagagagttgtggatgaactgaagcaaagcatgaaattacttatgaatgagtttagttcaggactttccggatcggctacaacagaattagaaaatttggctcatcagttaggctctgcaacccaagctatggccgattttccgaaaaacatggaaaatatttcagcaacattacaagttacaattgaagaagttaagcattccatttcggaaatatccaatacctctgccaatactaattctatggcaatgagacaaatgcaagaacaaattacatttgctactggtgctatcagtaatgccattaatgaagttaaagaagttatgtctggtatttcacaatcatcccaagagcaaagtaaccagatggtaagcaaactggcagatgctgcggacaagatgggcacattccttactggaactatcagtacattatcatcttctgtaacagaatccgtcaagtcaatcactgatgatgtaaatagtaaacaagccaacctaatcgcacttcaggaagatactacatcccagacaaaaagactgcttgacagtttcaatattggattggaacgtttggagaagatgaacgagtacatttcaggaactatgaatggcttcagacaggctcagggagaaataacgataagcacaagtaatctacgtacaatatctggtgacatgaaattagcgacagaactgttcaacaaaggacagaacgactatgctacaaggcttgcagaacttcaaaccatgagccaaaggggtattgatcaggtaactgaaatgttaagagactcaggtcagttatcagaggattatgtccaaaagtttgagattatcaaacaaggacttggaactatctttactcagttacagaacgggttatctgaatacagccgaacaataaaagaaagtactgacaaataccttgctcagtacactacgagcctaacccaaactacaggtgcgcttgcttcagctattgaacgacagaatgaagttacagaaatgttgaccgatacaattacacgtaataaacgataatgaagaagaaacgtacagaatacgaaagtaaagatgagaatgcctttgcactctccacaggtgacttaatggccagtcttctgttcatctttatactgctgctgatgggagcgctccttcaagtgcaagaaaaggcagaacaagacgaggaaattgtgaaaagatacgaccaaatcaaaacacaactttacatcgatctgcagcaggagttcaaagatgatcttgcagtttggagggctacaatagactcgactttatgcattcgtttccaagaaccgtcaatgctttttgatgaaggacagtccttgctgaaacctaagtttaagaatattcttgatgactttttcccaagatatatagccgtacttagtcgtgatgaataccgagataatattgaagaaattcgtattgaaggccacaccaacagcaacggaggctattattcaaacatggaactttctcaggatagaacaagagccgtgttacaatattgctttagtcttatgtctgacgacttggaagagtggcttaaaggccttgtaacagcaaacggactttcttcaagccacctgatactgaaaatgaacggcgaggaagataaggatttatcacgacgtgtagagttcagagtaagaaccaatgctgaaaagcaattggaggatatagcaaataaacgttttatacataaacaataatggaagacatctatgcacttctaaatattaacaaagatcttctgcaagatttccacttgcttgcagaacgtactgttgaccatcagactgagttggccatcagtcgcaatatgcgtaccttgcaggaaatagaggtacgcatgatgaccgacagaactgttattgcttctcaacagactattgatgaaattatgcagaaagtcatagagaatgctaaaacagaaaataaagaaacaagtatttggagcattcatgaacttcgtattgtttcttattatttaataaaacttcaagggaatgaacaggcatacatgtatgcgcttcatattctagagactaactggagggacatgttctttaacggattatcattttattgtcttgactcatggaacatgattgacccggagcttcgctcattgacttgtgatctgctcagcaagcagctaaaacaatacaatggttcaaacaagaaatacatggtaatgaagaaccatgcaaatctatttgatgaagctggtcccctaagactatgcgctctattatctcaaaagaaacaggatgtaaagaatgcccctgcatattttagtaacaaactgtcaacaataagccaatcatattactctgatgtgattgttaattttatcagtagcaataaaatcatagactttgactatattgaatctgttttaaatgctcacaaatatgatagaaccaaaaaacttatttttgcagatttagttttacgcgtaaatgaaacaggtgatgatgtaaaacgtactcaactatgcaagtatgccaatcgaatcttaggcgatattacgcttggcgcaacatgggctccatttgcaggcgcaactgaaaaacaagcccaacagctcaaaaaggcaaaacaacatgtaaatctatggtttagtcaaaagataattgagacattttttgaagtttgtgtacaagacagggatagaaaggacttctggctaaaatatgtggaatatgtaagcagtttcaaaattgttggatctactacaacgaaaagaatcttacaaggagataaccgagtcagcggtattttcctgccacatttcattgagacagattcgttcgcatcacagacatcagctcttgtattgttcattaagaataagatgattgttgagttctctgataccggtgctttgtacgtttacaaccaggaccatgaaaaagttaagatggtgacagggaaaaaacggtatattccaagcactgcagatctgaagattacatctatgggaagtctgattgatataagtgattggtactacaatacatattacgaggaaggaagaatgacccataggggaaattggcaaggacgtttaagcggttggttgcaacaaaaagtcatttcatcaaataacattggcatatcttttcaggatgctgaagacaataatctttttaaggcaaccccaattcaaaaagaagagtttaaaccatcatccaattcagtcccgaggacttcgtctaataggccaatcaagaccgtgtatgaagccaatattcgtttctctttatcaagtaaatggatatcaaatggtaaatgccggattgtttgtggatataaaggtttctaccttaacttctccgctggaaatcaatttgttcatctacgtccactaattagcggagcaaccccaactggtagtgtatggataagaaaggcaagaaatgacaatggatggcaagaggttgtacactcaaactcaggacgagaaataagtgttggatatttgaaggaaacaaatggaactgttttatataagcagagatcagaacaaacagattatatgactattaaaatttaaagaagcatatgttaactcaggtagtaaataaaataggaatactattcattgtaaatttcaatggacatgatcttcatttccaagaatggaaagcgacagacgatagtatatattatatgcctctttcaactttggttgacaatgggtatgcctatgcttcaaaagatggttgtcttgttccttatgaaaatatctatctgttagatgaggaggataagttacttctaggtgtcccccaaccctataatatggccatgcgtctcattggaacaagcatgttaaatgcatctgattttgaatacaaggttgaatttcttagccacgtgccagatggagaattattatcatatgaacaatgcggaaatatacttatagtcaacaaaaagaaatatttattatcggaagcgcaatatgaattgataaatcgtattcatgagtttaattcttctccagaggaagaaaaaactacagactttaacctgcgtaattttggagagataaaagcattagcagaacaagccggatgcgaattagacagttatttagcaaacgagaatgtttacgttccagaacgcataaaaattgaagttggtcgtgatgaagatgggtttaccattgatcctgccattgacattgatgaaaataaaaaatttcagcagtattttgatcgaatgagaaaagtacagggacagtaccctattcaaagagaaaatggcgaacgtgttcgcgttgtactcaatgaagagcaaaaggaaaatctacgacatcttaaaagtcaaggcggaagacacaaaacgcgcgaagaaattcaaaaaattatagaagaacctactgagttttttgaccctgatgcttttgatttatcggaactatatagtgaccgcgtaattgagattggtgtttataagcccaaattctatccatttatttgtccctacaaatcatgctggattgctggtgctacaattgaaagtcctcaaaatggaacaagccaagtgacaatttcaagtgagacagaattggaaaatctcagaaaagaaattaataaagcaaaagagaatggcaaatctattattgagtataaaaatgcccaaatagacatggaagatgctttgtttcttgcagattgtgcggcacagcagttaaaggcaccatctaagccatttaatgcagaatctgttgataacaaaaaagtgcttattatagaagaaaatgcagaagaacttggttttgctgtaaaagaaagagttatcgaaagaggcgaaaaatatacccttttcaccaatccatatcttcaagaatgctattcactaaaagaacatcaaaaagaaggtgttgcatggctacagcatttatataaaagtaaagcaagtgggtgtctaatggcagacgacatgggacttggaaaaactttacagatactttattttattgattggcattcaaggaaatatgctgatcacaaaccgtatcttatagtagctcctgtttcactgttagaaaattggaaaaatgaatatgaaagattcttcaagcaaccaagaatgactattaatatgcttacctctaaggatgtgccaagaaagtttgacaaagatattgtaaatagaatacaaaagatggacatagtcttaactaactatgaatctcttcgtatatcacagttaaatttctgcgcggtggagtttgacatcgtggcattagatgaagcacaaaagattaagtctcccggtacgcttgttaccaacgcagccaaggcattgaaatgcaatttcagaattgctatgactggtacacctgttgagaatacacttcttgatttatggtgtatcatggatttctgtgttcctggtttattaggtaatgcgaaagcatttgctgctcaatatcaatcaccgttaaaaaaagatgacactgacattgtcgctcttggtaatgaaattcatgaaaagcttggaatatattttatgcgcagattaaagaaagatgctgcaaaagatcttcctttaaaacatgaactcaaagagaaaattgccatgccaagtgtacaaaaaaagacatatacatcagtcattaatgcctatatgaatggtattcaacccaatatgcttgttacaataatgaacttgcgggaggtttcagaacatccttacctctacgactcggcattaacgactcatgacataaacgagctggttagtacaagtgcaagattacaggctactatcaaatttctcgattcaatcaaagaaaaggaagaaaaagtcatcatatttgttgaacgtaaggagactcagaaaatgcttcaaaagctttccaatgaaagatatggcataatatgtaaaatcattaatggggatactccgtctattattaaaagacactcatttgacaggcaaactcgacaagcgagcataaatgagtttcaagctgttgatggatttaacgtaattataatgtcacccgttgctgcaggaatgggactgaatgtgactgccgcaaatcatgttatccactacagtaggcagtggaatccagctaaggaaagccaggctacagaccgtgcttatcgtatcggacaaacaaaggatgtgtatgtatattatcctatggcagttacatctgacattaaaacattcgatgagatattggacgatttgctatcaagaaaaacctcactggcaacttctacaatcttcccttcagagagaatagaggtaaagcaagaagagttcggacaaatattatttggaatttaagtatattagaatatggtacaagaaagaatatataactactttgaacgaaacccacagcttcatgtgctctttatcttcgaccggatggatattatccagacagagcttggagaggtgaaggaatgggctgacggatatatatataaagtattcgatggagcctggttcaatacaaaatatgctattgaaaatacttggaaagacaaacgcattgttctgctttttcctgtggaaacctatcctcattcagaggaacagcaactacaatttccattgcttgatatgctgaaagccaacatggaatataaggaagatgattatgcctcttttatgcagcagtataatctgccagaacggttccgtagttttatcaagaaaaatattgcggaaatcatgtcttctaaaatccataatattcttaatgggcatattgattcaagtacctttagtgaggatttggtttgccgtgctttcatctccaattatctcggcgagaaaaagttgttggattgggaaacaatcattgtaaagatggttgttcttgacgttacttcggaagggaaaaaacatgctgatttttggcataaactttcaaagaacgtagatgccagcaaagcaatcaatgataaattgacaaaactttttggagtaagttataatctgaatttgccacaaaagatgaagtgcgttgcagaatgcatgaagtacaattgcatcacgcaattacttgatgctatgccaggggattcgtacaagcaatataaaatcagcaattcggtaatccttgaccaggtaaacaagatttatgagtggggcacccacgaccgtatgctgagcgagaaatttatccagtcaatgagaatattgtcttcagatattaaagaagaggaaatcatcaacatctatggtattgatgcaaactacttctattttactgaagcactttgctggccgattctgaaggagattttagaaaagaaactcatggctgatccagaggacgtaaacgatcgtatgcgagaattggctctgaaattacctgttgacagttacatccagattgtcattcgcttcatcggacagtcagctctgttctatatgcagatacgtggccttggcacactgaaattaaacagtacaaaagaatacgtaaataaatatattacggagttctatcaggtagatatgttctatcgtagaacactcgaagcctatcatgagctactcacgaaagagaatcctatcgaattggtattgaatgctgccaaaagacaattggatttggagtatgccaagatagccaacctgcttaacctcgaatggttgacttgtgtggaagaaaaaggcacctggtttacagaaacggggttgaagcatcaggaagacttctatgctaacgagtctgatccaaatgtgaaacaggtagtcattatcagtgacgctctgagatacgaagtggctatggaattgatgcagagactggccaaggaaaagcatatggctactattgaagcttatcaagccatgttacctacggaaaccaagttctgcaagccatcacttcttccacatcactcccttgaactgttcggcacagatatggccgtagatggagttgtattaactacaacagaacaacgaactgctcatctgaataaataccgagacggaggaatttgtgttcgctatgaagatgtgatgaacggtgaccagacttcaacacgagagctgtttaaacggcctttggtatatatctttcatgaaacaattgatgaagcgagtcattctcaaagcccgtttgaagttatcagtgcctgtcgtaaggccatagaccaacttgcagtgttaatcaaacgtttacatgcttcatggaatgtgactaatgtcttgcttacagcggaccatggattcctatataatgacatgaaatttgaagataaggataagcatagtatcaccgatatttcagtagagaagaaaacaagatactatctcactgacagcacagctaaagtcgagggtatcgtcaaattcccactcgaaaaggtttctgccataaaaagccagacacctctttgggtaggtgtatctgtcggtaccaacagattggcagcctctggggggtataattttgcacacggtggtgcatcccttcaggagatgattattcctgtgattcgcagtcagcagaagagaacaaataagacggaaaaggtaggcgttactcttatgaaccacaacctgaatatggtaagcagccgactcaagttccagctaattcaatcagaagcagtaagcatgacgatgatggaacgaaaaatcgtatgctgcatttacaacggtgacgaacctgttacgcaggaaaaggaacttactttaaacagtacagatgctacaaacctgaataaccgagtgtatgaggtgacgcttaatctgaataaatcaatcagtgcgagtatgctacagcttcgtatttatgctacagacgaccggttaaatccacttatccgtgagacagttaaaaataatacaatgatagaacaagatttttaggagcctactatatggattcacagcagaaagtattaaatgccttcattggcaaagtagtaagaaaagacctggcgtttttggttaagggtggacttcctgtaccgacttacgtattggaatacctgcttggccaatattgtgccagtgatgatgaagaaatcattaacgagggactagagaaagtaaaagatgtcatcaagaataactatgtacacagagctgaagctgagtcggtaaaaggacttatccgtgagcatggtaaacatcgaatcatagataaagtaactgttgtacttaatgaaaagaatgatgaatatcaggcaacttttaccaatctcggactctccggtgtaccaataggaactgactatgtacgtaagaacccgaagcttctgagcggaaacggtgtatggtgcatcgtcaccattggctacatcagtggagaagatgtaaaagtgagatgggaaatccagacattaaagcctatacagatttcgaatatcgatttgcaagagtatattgaacaacgtaaaaactttactacagaagaatggatcgatctgctcatgcatacagtgggcttaaatccagatacgatgaaccgacgggaaaagtttatcacacttgcccgtctgcttcctcatgtcgaaaataacttcaactttatggaacttggtcctaaaggaaccggaaagtctcacgtattccaagaattgtcaccttacggagtacttgtatcaggtggagatgtgaccagtgcacgactattcgtaaggatgtctgggaaaagagaagaacttggtcttgttggatattgggatgtggttgcatgggatgagtttgaacaacagaaaggacgtgcagttgatgccgtgctcattgataccatgcagaattatctggctaataaatccttcaaccgaggcaaaggaacacatgaggcaagtgcctccatggtttttgttggaaataccaaacatactgttcccttcatgttgaagaacacgcacctttttgaatctataccgacatcctttatcaaaggtgcttttcttgacagaatccatctgtataacccaggctgggaaatcaagatgctgaagaaagacagtttctccaagggctatggacttattacggattatatagctgcggtactacatgccatgcgcaacgatgatcgcaccgcggtattgaaagactatgccaagtttgacggatcactatctgaacgtgatcatttagcaatccgtaagactttctccggaatgatgaaacttctctacccagatggaaaaatgacagaccaggaagcatacgaattggttgattttgccgcagaaagtagaaagcgagtaaaagaccaactatatgtcattgatgaaacatttaaagctgagcctgcacatttcaaatatatcaatttaagaacgggtattgaaatgaatgtcgagacattggaaaaagttagcaatcctcttataatcccaataaactcaatgacaggtacagctactggggagttaaccgatgcagatgctcagcctttgaatgaagaaatctcaggaaaatgctccgtggaggaaggaaccactgccggtcaaactgcaaagcgcccccgtattcatatactacaagaaaaaagtatgacgttcagaatgggacaaacgggagttagctatgagaaattgttcgcttcatatatggcaaacgcaaatgaaataactgtggaggatccatatatacgtgctccatggcaaattaaaaattttatggagtttgcgctgatgctcattaatacgcgtccagttgatgacttaaagctcaatcttattactaacgaggaggacgataagcttcctgaacttatagacaggcttgatgacattaaggatgacctcgctacatacggcatagactttgaatacaaattcagagattttcatgacagatgcatcaaaacagatacaggctggacgatctcgcttggacgtgggctggatatgtttgagaaatacaacaccttttcaatcgcttcgtcaagacaggatatgcgtaagtgtaaggaatttactgtaacatttatgaaaacaaaaaatgcataagatatgtctaaactgagcaataaagcctttgccattatggctgtgtgtgagaagacaaaggaacattttggtattactgttgaccctcgtaatgggtgttatgcttttacttgggcttttaaaataaagaaagaacaagcaaaaaaagaaggatatgagcaaactcatgtgactggtaaagtaatgtatgataaagatttcaatggttgtccctattgtggctctaaaaaattctatatttgtaacaggtgtgggaaagttgtatgctatcatgatcaagaagttgtgacatgcccaaactgtggttcttcgagcagcttacaagcagcagaaaatgtaaatttatcaggtagtgatttttaaaaaacaaacagatatgattgaattaaaaaacggtgaaagtgtcagtttgactaacggttctcaggccaaagttgttaaagaactcggccgtggtggacaaggaatcgtttaccttgttgaagtcggaggacaaaagatggctttaaaatggtacttcaacaatatgggaaattggttttacagcaatctggaggagaatatctccaagggtgcaccttcggaagcattcctatggccagagtacctaacaacgaaacaaaaaggaacttatggttacgtgatgaaattaaggccaaaagattattatgaattcggacaatacttgctggcaagagcaaaattcaagagtttcgaggctatggttaatgcggccatgaaaatttgtgagggtttcaaagcgcttcatttatctggacttagttatcaggatttaaatgatggaaattttttcatacatcctgaaactggtgatgtcttgatttgtgataatgataatgtagcacctgaaggagtaacctctggaattcttggcaaggccaggtacatggctccggaagtggtgaccggaaaaactatgcctaataaatatacagacagatactcactttccgtcgtgctatttttgcttttctatgccaaccatccattagaaggagcacgtgttcttgcttgcccatgtatgactgagacatatgaaaagaaattctacggcagtgagcctatctttatttacgataaaaataattcagagaacagacctgttcgtggtgtacacaataatgtattgcgcagatggaatgcttttcctgctttacttagagatacttttatacaggagtttagctctgtttgtttgcatgatcaaaacaaaaggaaactcgaaagacagtggcaaaatattatccagcaacttcgtgatatgcttgtagtatgtcctagatgtaaagaagaaaccttcgtagagaaccctaacgctgctcaatgcatgtgttgcggtaagccatttacaatatcaggaattatgaagataaacgaccgtaaaatactcctaactcctgaaaaaaaagtatatattgatatggacaacaagcctgatattcaagtaatatcaataccaggagaccgttatccagtccaattgaaaaatatcactacaaataattgggttgtagaaactccttcaggcaaaataaaaccaattgagcccaataaagctatgcctgtaaaagtagggttaaaggttagcctcacaggtgctatcaagggtgaaatcatataataatttaatgtttaacatataaatattttttaagttatgggacttttagacaacgaaagcattccaagaagaaagatgattctattttttgtaatcgacacttctggtagtatgattggtaaaaagattggaagtgtaaatgatgccatcgaaaatgtattgccaatgattggtgaaatttctgatgaaaatcctgatgcagaaattaatgttgcagcacttgagttctcaacaggtacccgctggctttatgatgaacctaaagaggcaaaggattttatttggcaaaaagtagaagcgaacggcctaacatctcttggtgaggcttgtgaagaattgaacaaaaagctatctcgttctggaggctttatgccgacatcaagcggaagcggatatttctccccagctatcattcttctttcagatggtggaccgacagataactttgaaggtggattgaaaacgcttcagggtaatagttggtttaagcatgctatcaagattgctattgccataggtgacgatgctgacaaagaagttttaaaacaatttacaggctcttctgaagcagtcatcaccgttcataatattgaagcgctcaaaaagatgattcgaattattgctgttacatcttctcagataggaagtcaaagttcatcagctatagattcgacaaaacagcagcaggtaattgacaaggttaatgaggcagcagcagatgtagctggtgctgagactgcagcgtcacctgcccctgctggtactgatagttatgacgaatgggactaataaattctatgttatattgatggacagtatatattcattctgcgaaggagagagtcatagactctgcaataaaccttgtcaggactatgcgtatgcagatagttcagagggcctttccatggctattgtttcagatggccatggaggggaacgctattttagaagcgatataggttccaagttcatcgtcaatatagcaaaagaagctatccgctcttttgttgagacagtaactaaagaaagacaatctgtatttcatggcgaaccatttacgcaatatacaaaagagtcagccacagacagccagataaactctatttcccacaagatgcttacctggttattttcatcaattataagccagtggaacgttgctgtagcaaaacatgcacgagagaatgatttgacagaatgggaactttccaatgttgaccaaaaatataaagatgagtttctcgatatgcgcaataacccagaagctacattcgagaaaacatacggatgtacactcatggcatacgtgcaaactcagactttttggtttgcatttcatataggtgatgggaaacttgtacgcatgagcatagttaacaacaagattgaatttgatcaacctgttccttgggacaacagatgttttttaaacaaaacgacatcaatatgtgattctaatgcacttgaagagttcagatattgttatcaaggagctgattcatttccaatcgctgtatttcttggatccgacggattagatgactcttatggtgatggtaatcaactatataacttctatgcaaatctttataaacagattgctaaatctggtagaaaagaagctcaaaacgttttaaaacgcgcattacctaaaatcagtaagatagccagtaaagatgacatgtctgtggcttgtgtatatgatgacttaaatattaatgaaaacttttatttagttaccgcctatcaacgggaaatattggcagataaaatgactcttctattagatgaaaatcaaaaacttgacgaaaaaattaacagttttggattagaagagactctgaataataaagagaggatagatttacagtatgctaagaatgactgcgacaaagttgacaagaaaataaaaagggttaaggcaaaacttaaagaactcgaaaatgaagagtatgcattcaataacaaaaaccatcctccaaaacaatctacaaaaacaagagttaagaatagcaggacattagcaaaattaaaaaaaataaaaaaataggctatgggaacttgtaaatattgcggtaatgatgccggttggttttctcattcacataaggaatgtaaggagaaacatgaacagggtgtgaatgatttttgcaccattgtaagctcatactttacattgcgtacaacggccggaaatgttcaacaatcaagactacgtcttaagaaagacgcatatctttctgatgatgacatatgcaatgtagcagatgcagaaatcagacgctatactgcaagtctccatcgtccttattctccatcatcggtaaaactactagatgagtttttaattgctattggggtaagttatagtcaggtcaataagaatggagctgttgatgaatttaccaagaaaataatgcgaggttttatggtagaatattttactgataaactaacactacctgtagcacatcagcgttgtgaaaaaatgcttagtaaatttcctatggtacagtcaaacatagaagatgcctatctatatgttcttaataaagcagctattaattttatgaaaaatggctcgctttctaatgctgaacaacaaaagatagatgattatatcaattacctccacctgccagtcaataatcttcctattcagtatcaaaacagtgagattagcaaacttggccagatgagcatacttagtaaacttcaaaatggtattcttccttctagtaatacacctgctcctatcatgttaggaagaggtgaaactattatctggacatataatggtgttactatgtatcaagaaaagactgtaaaagaatatggaggaagaagaagcggttggtcaattcgtgtaatgaaaggtttaacatatcatattggtggtaccaaaataagaccaatagagcacagttatatggataataagggaacaggtacactctatataaccaataaacatattattttccaaagtccaacttcagctcagaaggttccttattcaaagatgataggtgtcactccttatagtgatggtattgaaatacaccgtgatggtgccaatgcaaaacgtcttacctttcaaggtttcgatagttggtttttaatgaatgtcatttcacaaatagcaaatatataaaaaatatggcctgggataaagttaatataaaaagagataacggagaaattgttgaagcacaagctcctattatcgtgtcagcaagcagaagtactgatataccagcattctatgcggattggttcttcaagcgtttggagataggatattctgcatggacgaatccttttaacggtgtaccattatatgttagttatgagaaaaccaggtttattgtattttggtctaaaaatccacgtcctttaattccatatcttcaatttctgaaggataaacatattggttgctatattcagtttactttgaacgattatgaaagagagggacttgaaaaaggagtgcctgaattaagcgagagaatcaatacattcagagaacttgtaaacattctaggaaagggtcacgttatttggcggtttgacccacttatcctgactgactctatcagagtcactgacctacttcataaaatagaatacattggggatcaacttaaaggttatacagaaaagcttgtattcagttttgctgacatcgctgaatataaaaaagtaaaaaggaatctggagacaaacaatattcattacgaggagtttaacgagtcaacaatgtatgaaattgcatcaggacttgctgaactaaacaaaaaatggggatatgagcttgctacatgtagtgaaaaaataccattagaacaatttggtattcagcacaatcgttgcattgatgatactctgattgccaaaatagcatataatgattccgcactcatgaagtttcttggttatgaggttgtttcacactttggaaaagaattcggagctattattccagatggagctcttgaaatcacagatacaatgtatctatgtaagaagaaagataataaagacaaaggacagcggcaattttgcggttgcattgtcagtaaagatattggacaatacaatacttgtccacatttatgcgaatattgttatgctaattccagtaaggctaccgctgtaaggaactggaacaaacataagttagacccatttaatgaaaacatcttaggaaaaggaatagaatgaattacattgataccataaagtcaataactccactgtctttagatgatataataaagacagccaaacaacacgtacctgctcaatatcgacaaactccatggaattatcccggacttgctcatggaactgctattcttcaggatgaagagcagttatgctgttatcttgcttcttatggtgaaatgcaccaaggtaaacttgcttgtgctttcacaaagtttccatatctcaatatggacaaaaatattgaaataatagattggggatgtggacaaggtttggcaagtatttactttattgacaatttaagacagtacaatctcttagaaaagctccaaaaggtaactttgattgaaccatcatatgctgcactttcccgtgccgaattacacctacggcaggctgtaggagattctgtttacattgaaaccctaaactactatctgccatcaactgtcgaatcacttaaagccaatgcaattggaggcatacatattgaagagcctatttgtatacatctcttttccaatattcttgatattccgcagattgacttaaaagagcttgcatatcttgtgagttcatcaggctatcgtcactattttgtatgtgttggtccggtaaactttggaaatgaaagactttctgccttcccacgatatttcaatatcccaaatgatgcttacttcattgattttaaatcaggtcagtataagcaactttctaatggtaaatggtatggatgtattgcaaaaggattccaagttattcgtgaagaaggcaaaccatttcttgtttccctttcgttttatccaccaaaacaattccattgtgctttcagacttgataccattgaggatattgacaggaataattcggatgcacagaaatattggaatgagtattcagcttttgaagttctagcaccctttgatattggagcaaatatatatgaagacatagatcccgttttagcggttctaagtaatataatttcacgaggattaccaactaagtgttcacctttcattgagaagaagcttaataatgctttagatttttcagaggaaacagaaaaatatggtacaataagatacgttaaaaaagctggcactaagcttgccaacgaacaattactacgtgaaatcccaattgcagttgccagaattgaaaaggttataatagaggcagtccttactggccgcatatcactagataaagaaacatgggatgttattgttaaggaaaatgacgttccatgttctgccattgcttttgctgatttagcagaaatgtataatcatcttacagctctttcatcggactttacagacaggacatttccgaagataaatttatatgttatctcagagtcatacacatcttcaccgctccatcttggaagtactgtctattcatataataagcaggctaatagagaaaaaacctatgatatggttatcgatattgccatacatgagaaagttgatgctgtaaatgttcaattttcggaattcaaggctaataatgattgctatttcaacgtacgttcgtcaaatacaatctatacctctcgtgaaatttacaccacagaccgaattctttaccaacctgtaacgaccattaatgtaaatggtgggcatacagtaataaaagagactgccgagcatttggaatatttcttgcaactaatgttccgaaaaagggaatttagaccggggcagttacctattctcaataaagctctccagataaaaggggtaataggactcttacctacaggtggaggaaaatcacttacataccaacttgcagcaatgttacaaccaggagttactgttgttatcgatccattgaaatcgttaatgcaagaccaatatgatggcttgctaggtactggaattgattgctgtacatatattaataacgaactctctacagaagaacgggcttctcatgaacttatgatggaatcttctcaggtgatatttacatttatgtcaccagaaagattatgcatatttgaatttagagaaagactaaagaacatggaagaccttcacgtttatttctcctacggtgttatagatgaagtccactgcgtttcagagtggggacaggatttccgtttttcgtaccttcatcttggacgcaatctttacaattatgtaaaagcaaaaaatggaacaatctctttgttcggtttaacagcaaccgcctcttttgatgtcctttctgacgtagagcgtgaactttcgggaaataattcatttacattagatcctgatacaattgttcgttatgagaatagtaaccgccttgaactgcaatataaagttgaaaagattgaggttgagtataaaaaagatcagttctatgataaagaaggacgattgagtaattatccaagtgcagtcaatattggagatgtctggagtacaaatgagcaaaaagcaaaattcttgtcaacatacatatatcgtattcctgattatattcgtcaacttcaaactaaagactcaattgacagaatcttagaaagatttcacgagagagaggaccttgaagaagttgatggtcagcatttactcgttgatatgccagacgatttctactcacaaaaaagtgattacgagcaagcaggcattatcttctgtcctcatgtaaatagcagtgggataagtgtttctgtcaattcaaaaaatctctctgaaatatgtgaagtaggaacattctctggttctgcacaagatggtgtaacacaagggaatgattcaatggagaatatgaaaagattcagagaaaataagctgccaataatggttgccacgaaagcttttggcatggggatcgataagccaaatgtaagatttactgtgaacatgaattactccagttctttagaaagctatgttcaagaagctggccgtgctggtcgtgatcggaaaatggctctttctgtcatacttttatctgattataatcttgctcgaatcaaccccaaatatccgaattggagttttccacttgacataatcaaagggagatggtttaaggaagaagatcttcatcatattcttgaagattttggtattagcattgaaccgagatatatagattattgtactccgctgtctgatatagtaaaattaaagtgcaatacagataatgtcgttgttaaagaagatgggacagaaatcaagcagacatggcgctgttcggataaatgctcaaagtacaaaaactgccaattgcgtcatgttgataaaagtatgagaggatggcaatttcatcaagatcttagagactatcttagaactgagcaaataagaataccaaaagagaatattgaatatcaaggagcagactataatacagtcatgtatttctttgacaataactttaaaggtgaattcgaagagaagaaaaagatgtactatctgttgagtcaggtggatcttgaatatttcatcggaaacgacaaaaaagacaagccaacggaacatatccatgcaaatggttttcttgaaacggttctaaattctgaaattggaacagaagtagtttccattatttcatatcaagatgatagttatgctgatatagcaaaggctatttaccgtatgtgtataattggcctaatagacgattttactcaagattatagtaaacactcattcagaattctttcaacaagaaagaagaacggatcctactatctacgtttaaaagaatttctgatgagatattactctgaagaaagagctgaaaacgaagtcgaaaaggccagcgtcagaaaaggacttaatgagattcataaatgcctaggttatctgacagaattcatatatgataaagttgccctcaaaaggaaacgtgctatagatgatattcgtaatttctgcaacattggaattgatacgtcaaaggactggaaggaaatcaacgaagatttgaaagatgaaatatactattatttcaactctaaatatgcacgtgaaggatatatgacagacaataacgagagtttttcacttttggatgacacagaccgtggaaaaaaatcctccgcagaaatattatttaaatacatgcgtgtggttgattctgatgtgataggagcctccggctcgccaaaagataacataaaacatcttcaaggtgcggtcagacttatccgtagaggaactacagactctaatgcaactctcagtttgcttaacgtattctgcctgcttgctttaaaagtcggtaataataagaatctaatgaatgagcttgataaaagctatattgaaggttatcaagaattgaaaaatgagataaaaaatcacgatgacttcgccagttgtatttctcggtttaagacaaatcttaatattcacaatcgaaatttagcaatcgacgaagatataaaacatcttgatgatttagagattatagcagagttaggttatcacaattcatggatggatatattcacaaataagtatataaaataaattcccaatatggaagcacaagatattcttaaaatgctcaccaacttagagcaaagtcttcagaatgttgaatctgcaagacaacaagttactaatactgtaaatgcatatgaaggtacaaaagcacaacttcacgcattaactgtggagtttaaagaggtttcttctgaattaaacaaagtttataatgctataaaagagaatgttgactctattgatgaaacacttaaaataaagattgattctgtatttaagagcataagtaaaaaagtggatacacttgatgcagttgcggaaaaaattcagtcttcatttgaaaagtcatgtaacaaatccgtcaatactattgagaattcagtacataatagcataggaaaacttaacaatgaagttgatcaatccatatccaagtttaatgaaaaggtcaaacttgaactagatggcatatcttctaccctttcaaacttaaaatcgtgtacgaaagaaattcaggacagtttccgaaattctaatactgcttttacgtccgacttaaaggttatgcttaaaaatattgcagatgatttcaaagcgtctgtagaacagcatattttatcttttacttcattaaaagatgagcttaaaagtattattgatggttatgaagagaaaagcaaaaccgttgtaagtaaagtagacaatatagaaagtataataaaatccgaaacaactattttaaaatcaaaaatagaagttgttggtacaaatcaaaagaatcaacatgatgaaattgtcagtaaattaaaatctctcagtgaagggcatattaaagctgctgataatttgtcggaacgatttaatactgttgatacaacacttaggacgttgtcatcttcaatatcagaattaaagacacaatttgattctaaagaaaaagatctttataatacaataaacgccctaaaaggagaagttaccagttctaagaggttacttacattctgctttatagcaatcatcatatctttactattaaactttattgcatttataaaataatgagactttatattttacttgatacatctggcagcatggatggctcaaaaatcagtgcgttgaatgattcaatggaaaatattattattgatttgcaggaaaaggcgtttaacggcaaaaacattgatattgttgtcttatcctttgcaagggatgttacttggatgcatgataagcccattaatattttagactttaattggaagccattaaccgcaagtggaatgacctctttaggtaaagcgtgctgtgagttagcaaaaaacataagtacatatccagctaataatgaaaatactgccatagtacttcttagtgatggctgtccaaccgatgactatgatgagggaataatggaattgcgtaatttacagacatttaatgatgcagataagtttgctatagctttaggagacaatgctgatttacagactttaatcagatttgtggatgttcaagaaaatatttttatagaaaataaagccgatagattgattgatgctctaaacacaataatgggaaatatcaccaattacacttcaacacctttacattcagatgatatagatgatgaatggtcgtaatttacactaaattataatttcattacagcaaaaggggcatgtataatattaaaatacttagcctctttttatatttttattattgtgcagatagactgcataacaattatatatgtttgcgaataaaacatataaacaacaatttatcatgaaaccatctactattgtatgcttggtactatcagcaaacttccttgtttcttgtggttacaagaaagaggctaaagaagttacacaagattttttctccgctatcaaaaacaataaggaagaaaaaatggttgaactatatcctgaagttggaaaccttcaaaactattataaatcagacacaataatcgtgaaagaagtaaaagaactcgaagacaagaaatacagtgttgcattaacaaacaagttcactaacggattcggtaaaaatacagagtcagacattatcatatatacaaagcctaaagacgataagaaaccaagtgacggctatgtaatttatgactcaaaaggactatgcaatctttctgatgatcctatatatatgttcgcaaagagaaaaggctatatacaaggagatactcttacagaccaacagatttcaaagaaatattctgaggcatcaactgcaattatttcgctatcattaaagttttatacttatcttactgagaatgtaactatagcaaactggaattgggaaacaagtgattatagttattctgcaagtggaagaggggttgtaaaaaataatacccaatataccataccaaatgtaaaatacgtggttacgtatttgaaaggaaatggtactgaagtaactcaggatgacggctacgttacatacgacgaaatacgtccatacgggatgaaatcattttcattctatacgtcatatgttggcgatgcatccagagcaaaaataaggcttgaatttgataatgattttattcttaaaacagtggctgatggtgaatttgaatagctgattttttatagaataaaaaagagtacaacatgtgaaaacagtgcaaaaatggcatataaataaacagctaaaaagctgacattctggcatataaaatagatatttattgactaaaatatttattaacaagattattcgagttggcatggtatttgtattatttatttataaataatgttatatgggaaaacatccttttaagattttatgtattgatggagggggaataaaggggctattttcagcacaaattctcgctaaattcgaagaagtttacgacacgaaaatttcagaacaatttgacttaatatgtggaacatcaactggaggaattattgccttggctgcatctgctaatatctcaatgtctgatgttgtaaacttttacaaagaaaaagggccaaaaatcttcgctcaaaagaggaaaaaaaatttgggaaagttatggcttaaaataaagcaaatatgctataaaggtaaatatagtaatgaagaattaagaaaagctttagctgaagtctttaaagacaaaaaaatatacgaaagttctaatctcctttgtattcctgcttttgacataattacggctacgccaagagttttcaaaagggactataaaaaatttacagaagataataaaaagacatatgtagatgttgctcttgcaacatctgctgcgccaacatacttacctatacataatcttgaatcaagtcaatatgtagatggaggagtatgggccaacaatccaagtttggtcggacttatggaatttttatatcaatttgccaatgatgagagatttaatggtgttgatatattgtctattagtagtcttgaggtggcccagggaaatgccccaaaacgaaactataactcatttattgactggaacgagaatcttattgaattattttcaatagggcaagctaaaaatatgacaaaactctttgagttcttagatgggaaattaaaattcccgatgaattacgttagaatcactaatgaacctctgtcagccgagcatatgagaaatatatctatggataatgcttcagaccgttcattaaaaatacttcagtccattggcaatgctactgcaataaaagctaaaatggatccgaaagtagagagatttttcacgacaggtaaaacattatatttctaaaaatatggcaaataatcacgaacaatttattgcttttaatgacacaattaaagcatcaaaatcaagaagagatacacttaaaaaaaatcgtgaatctattagaaagaaaattcgtaattacttcaagaataattggccggataaaattcagccccaatttcattggcaaggttcatactctatgtatactttgctgaatccgattaaggatgaagatggacttggtgcatatgatttggatgatggaatatattttattggttcgtctgaagatgaacgtgaaactgtacaatggtatcataaccaaatttatgaagcagtaaaggaccacacaacacagggtgcaaaagacaataacccatgcgtaactgtatattttgcagataaccatcatattgatttgccagcatattttatggtagatggagatgagcatcccaaaatggctcacaaaaaaaatccatggatggattcagatccaagagaaacgaccaattggtttaatggaaaatcagaacatccacaactgaggagaattgtacgatatgtaaaagcatgggctgactatgtgaacaatcagggaaaagggaaaatgccaacgggatgtatacttaccattcttgttgaaaagaatttcacttcaaatgatagagatgacatagcattaagggatgttctcgtaaaaatgaataatagtctcagcgctaaagatggttttcattgttatcgccctacattcccagtaggagaagatttatttgagcattacaaaacaagccgcaaagattttttccttaaagaattgaactcttttgcgtctgacgctgataaagctgtaaattcatctaatcaaaaagatggttgtttaaaatggcaaaatcacttaggtgaacgtttctcttgctcaacagcaaaagacgaagatgaagatgctcagaaaaagaatctatcaggaacattaaaaacaaatagtcgctttgcataataaagaattacttaaaacttgctttgctgaaataagtaaggaagacgatgtagaacttgttggtcagattccaacaacttcacagcattcatacatagagtgttggaaattgagtacctatatttcagtagctcctgttgctgaaaaaatagaactatatataggattcccaaattcatttccatatgaatgtccagatattttctattttgatacgaagtatgactacttccctcatatagattatacttatcgaagactctgttatcttgaagaaggaataacttattctccagatcaacctatttcagtattacgtgaatgcattaggcaagctaaacgcttgatagagaaaggggcaaaacgtgaaaatgaagatgattttatcaaagaaatatatagttattggataggaacatatccaaacgaacaaactattaatgatgattggttgatttatggtgatatacctaccacatcacaaatccttaaggtttggtcatataaagaaactctatatacggaaaaaggagcttctcataatttaattatacagaacgatgatattgatattgattttgaacattatctaaagcgtaaaccttacttctctgaaaatgaaacattattcctcagaagtgttgagattccttatacgcctccatattcaataagccctttaacgtttttagaatggattaaagatcctgatgataaaaaattgttcaaaaaagttctcaacaagaagaaaaaagtaattgttacgtttccactacttcatacaaaatatcttggtggatgctatataccattgcaaccagcctttagaaaaggccatcgaaatcttactgcatttgaagaacttacactttttgagaaaaaaaacaggtgccttcaacggctcattggcaaaatatattcctctgatagaatagaccaacgtacttcaggaaggaagttgggaacaaggaaatttgctgttataggacttggaagcatcggaagtaacttatgttattttttaagtggatggtctaatacggaatatatacttgttgataatgatattatgcaaccagaaaatattggaaggcatttacatggtatgaaatatattcaacaaagtaaagttcattccgttgaagagtttctgcgagagaaaaggcctgattcattaataaaaagttatggtaattcaatagagaacgttatagaaaaagatctaaatgagttcaatagatgttctgcattattcatgtgcgtaggagattgtatgtcagaacaatatgtattgtcattggtaaaaaaaggcattttacgcactccaatatttattctatggcttgagccttttgcaatagctggacatctagtatacataaatcctgccaatagtcctaatttggataacattttagaaaaagatacaatgttatataagcataatataataccttcctctgaatacatcagtagaggtgaaacagaatttattagtagagatgctggatgcaatggggcttatgcacattattcaggaaatgatgttatactttttttgtcggctatatatccaattatcaataacctaataaaagaaccttttaattcaatgtgctatcgatgggtaggaaatctaaatattgcaatagagaaaaaaataaaattaatagaaggggaacacatttccggaagtatcacgaaaatacctctatagattataaaaaaataaaggttgaaataaaggaatctgcattaaagaaacttcaaacttttcagcagaaagaaggatttgagattggtggtgtgtttacagggtctgaattagaagaatctaaatttcgtatagcaaaagtttccgatccatgtacaatatttaatggatctactaaatacaactgcacaagagatgcgagattagcaaatctttttatagaagaggattataaagtatcaaaccgctccagatattatttaggggaatggcatacccatcctgaggataatcctcaaccttcaaatatagatgtcgcttccatcaaaaatatatattctacgtcaaaacttcctattaatggagtttttttgataattgttggactaagaagcaactattatggtttttatgatggtaaaaacattcataaaattgacgttactttatgtacataactttattcacacagtttaagaggatgatagggtcaataaccttaccatccttttttgttgtcaggtgcagatgggggcctgttgacatacctgtattaccagacaccccgattatctcaccggccttaacatattgtccgattgtaaccttagatgatgacaaatgacaatagctgaccgtgtaggtgtcggtttgaattgtgatgtatctgccagaacgcttatcatgagcagacttcactactttccctggaagcatggaaaacacaggttcgtagtgtgcctgaagatctactccattatgcatgcaatatttatgtgtaacagggtaataacgcattccaaactctgagtttatctgaatattctttaatggaaaagccatattcaaaaattgaagaatatcaccagatgtttgtgaagagggtcctacattatcccggcatgattccaccatatttaaatgtgatgaagcatggttcaaagaatcttttaacatcaaattgtccacaagagaagtatttgtctcttgtggattttttgttttgtggacttgttgattatataaacgcccaaccgtattaaactgcgcttttattgtggtacttggcataaacgagagaagtaccatcatgagtatgtttctaatttccatgaaacaaaattacatatctctattaccatgggataaacctcacatactccaagtgatttttctaactttatttaggctaatagtatgattctcggcgataaatcatacttctttcataaggaaatataaaactattggtataatatgtctattcttccgtttctccaaccacaccttttatttttgtttctgaattagctattaataaagtacttcataagaaaatgaaatactgttatggccaaaataataacgtattaaaaaaagtaacaaatgatttacaactttgatgagaatgaaatgccttacggcattctcgaacgttttggactgacacaggagatgattgaggatctgccgacagacattttgcaaaatattctcaatggccggcattctccagtcttacctgtacacatcattgctgatgatggtgaagaagtaaaggcaagaacacgattctgccttgtaagaacgccagaaagcaatgtagatgttctcttctttccgaaacttgacgagtatgatttaaaagtattcaatgagcagcagaagcaaaaccttcttgcaggcaaacccatcatcggacatttggaaagtaacgaaacggggcacgagcttggcaccaaatgtttcttccagcttgaccaggatagcaaacaggtactgagcgtgccgacaccagtcataggtaggaacattcaataccttaccgaccgatatcatcttacgagtactgagatgcagaaactacaaaacggagaaattctctctatcattgaagacgatgatgagatttccatcggtatcgatcttaattcaaatacgggtatccgtctctccgcaggtaatgaacaagtttggcgcagagaagctaaacgggaatgggacaaatacaacttcggaattttcggttgttggaccatggacgaaaatggtaatcttgactatatccatgaggaggactactctgaagaaatctggaatgagcagaagaaacaaggtatgcgtatgatgcagcgataaaccaaagtaacaaccatcaataacaaattcaatatggcgaatatcaaatactatccagaagacgagcttgtgcagaaagtacagagtggagaatacggttggctcgattacatcaatcaccactcaccggaatggcaggaagaatacaccgaattctgtaatgaaaggaaccttgtagttaacgaagaatcagccgaagattttatcgaatggaaaggcgaacttgttgaaacaggcgaataataaacatttaaaatcaatcacagtatgtcaatcagatcaaatgcactatcagtaggtagagatttgtcgccagagctgcaggatattctccgtcgcaatggtatgcaagcacatattattcgacaaggtgaaaactatcttctgtcggttcaagggcatgactcacctctcctaacctatcatatcagtgccagacagatgagagacttggcagattggggtacaaactcggctaacaaaaaagcctataacacctttgctgatttagtgaagaaagacttctatataccgagagactttgtccatgcccgtaatgccaacggtcgtgtggctatgggacttcacggctaccggattggtgttggcgaatacggcagactgccgtgggacaaacgccgtgcctttatgatgatggatccgtttcatggacgttttttgggatggacaccacgcaatcaggaaggcttccacatgcgccgtgtcggtggagccatgttcatgcaaggaacccctatggttccggaacgtcccgatggaagaatcaaaccaggtgaattactcaatggaggctatggcttctattataaaggaggacagcagaacatggtacagcagccttcacaggatgtactcgctgatttggaaacagtgattccacctgtagaaatacgtacccgtccccaggaaccggcaaaaccatacaaggaacttatcacctcagacgtatactttagcaacgaaaagtggcaggaatgtctctcttctcatggagtcattattgatgccaacagcaaaaccctgaccattcagtcgaccgctacacaacatgatcttgtttacgacctaacggatgaagaagttacccggcttacagacaattccatcaagaatgtgcctgtacagaaccgtctggacatcatcaacaacgttatcataaatgatttctcagataaattgacgatggacatgctcaattccaaagagcagatacccctaaaacttactcccgaagtagaagcggaactgaatgccagacaagaagttgtggcagaacacgcgcttcctcttactcagggaaatgaatatatcattgcagagcatgaagaccgaagcgtcgctcatgtggatggtaacagcctttatgatataaaccaagataaaggatggttccgggaaggaagaaacggacgtgaggtacaggtggacgacatcagagttgagcctgtacgcaacgaacaaggtgaaattcagaaagacgagaaaggcaatgccatgttccgtatgaccgctgtcatcaatggcgagagcatcagtcacgagataacccaaaaacagtatgacaagttcatggccgtagatgactatcatcgtatgaaactcttctctcacatctttgatgaagtggacatgaagaatgcgccgggtcatgggaaaaatataggtgccatgattggaggtgctctacttgccggccttaccgttatgcgagaactcggaagagaccgttatgctccggctgtgttcgttgagcaccatcatgcacctggtccgcacgtctatttcaaaggaggtgtggattcaccacaggatcttgcatcaagagcatttgatgccggacttaatgcagctgagcatggagtcggcttaggacatgggagataaaacttaacaatcatcatagaacacaatgaacgaagagcagaaatttgaagactatcgcaaccgtcttaatatcagagacgtgttgacggatgcaggttatacgcttcacaagcgggacggcttgcgctatcctgcctatgtgcgtctggataatgatggacgcagaatcaggggtgacaaattcattgtcatgcccaataaaaactgttgtttccaacctccaacgataaagctgtattctgtcacatccttcatttgggaacacccgaatctctttcctgaatacaatcaaggaatgaaagagtctgctcttgttcacaaagtctgtcagcggcttttgaatattcctgtggagcaacgtaaccagaatgtgcttgctcctacccgtgatgcaaagcctttcaatatcaaagattataagattgagcgatttcatcctgatgaagctgactctcagaaacctttttatgctttcttcaagtcaagaggaatcgattttgctacacgttgtgcttttcaccgtaacttctttcttgcttccaaggccgcagacaatggggcaagttataagaacctctcttttcccatgtatataccggggcatcctgagaaatgtgtcggtttggaagaaagaggctatccacgtaaggacggctctgcacgaaaaggcatggcagccgggacaaatgcaagtgaaggcctatggatggcaagtcccaaagacacggaactgaaagatgcaaaagatgtatatgtgtttgagagtgcatacgatgccatggcattctaccagttgagaatgcagaaagactccggacttgattacaatgcaagacagaatctgaagtctgccgtatttgtctctaccggaggaaatcccagctacggacagatacagggattggtcaaggctgctcccggtgctactttccatcttggctttgacaacgacctggcgggaaaacagttcgtcttcaactttgaatccatcgtacaaaagatgaatccgttgcatcctgaatcagtctcatcggacatgaaaggcttcattgaaagtttcaaggaaggtatcacatccaccaaagagctgcttgacattgacgatgacagatatgcggagctgcctgaagtactacagaagctttacctcgcttatgacacagcaagaaatgaggcatgggaataccattattctccctttttgtgtaaggaagacaagcaggaagcggctgaaagaatgaacaaagcctatcaggagtttaagcaggtcctgtttcaaaaactccatgtacaggacggacaagacctgaatcctataggaatagtacgtgaactgccgtctgaaggttataaggattttaatgatgagctgttggagaagaagcaatactcaatgaccgatgtcgttgagacagcctttgacgaaaatagtgtttctctcaccgaagagatagaagaagaaaatgaagaaaccaagaagagcggactaaaacgataaacagtatgacagacacaaacagacggttcagcataatcacattgcatcctcattgggggcaatacattatctcacaaggcatggcatttcttatcagttgtgccctgttcttggcagcaggtcacgatagcatcacctataagatgccctttgtggtactgggttcaatcatgacgtgcatcatgctctacggttgtctatatatacacaaactgagctatatcatcacgtccgaacaactgattatccaacatggtgtactcatcaggaagagcgactacattgaactctacagggtggttgacttcagtgaaaaccgtggtatagtggaacagctgttcggattgaagactgtctcgattttcagcggagaccgttccaatcccaaactggacatatttggaatcaacgagcggattgatgttgtaggaattatccgtaaacgggttgagtataacaaacaaaggaaaggtatctatgaaatcacgaacagataatatatcgtcagaagccaagacttccaaaggtattgcttacgacagcagatggatgattatctcggtcattgttctgaccttgtttctattctgtcttgaaggtcgtgcccaattggtttccagcaatccgatggaatatgtggccttagccgaaggtaatgagcttatcaacagtcaaatcaagaatcagattgaagatcagcagaagacggcactactacaaaataccattgcagcagagtttactcagataaggcaatgggagagaaagtacaacagctacctgaaaaccgtgtctggctacgcttctaccctcaaagcctgtagtcatctctatgatgacggtgtaaggatattcattaatctttgtgatttgaagaaagccatatcacaaaacccgcatggaatagtggctacaatgagtatgaataatctttacatcgaaacagcgaccgaactcatcactgtatacagcatactgaaagatgcagtagccaaaggtggagcaagcaatatgcttacaggtgcggaacgcagtaagattctttgggagttgaatgaccgtctggcacaattcaacaaaagactttcacagctctccatcagcatccgctattacacaatggccgatgtatggaacagagccactgcaggaatgatagacaggaataccgctgagattgccggtcaagctttagacagatggcatagatgcgcacgaatagtaacaccataaaagattatcaggataacacaatgaaacgcttattgctgttttttgccatgcttatttctctcaccctcccttttgaaaggctgggtgggagttttctccaggctcagggcaacgaccctgttttggctggaatgattctggcatacacaaataaggcagaaaaagaactgaagcagcaggaacaaatgatgcttctggaatctacgggtcatctgtggataaaggaagaggtacaaggagtaactgacctgcaaaaggagttcaacacttatttggacaactttcatagcataatcagttatgcggcacagatatatggattctatcatgaaatagaccgactcgtgaaacacctgggaacttttaatgaccagctccagcaccagacaggaaatgccctggcagtagcattgtcttcaaacaggaataaaatctatagagaacttatcatgaatagtgttgatatagtcaatgacatccggcaactgtgcctctccgacaccaagatgacagagaaggaacgactagaagttctcttttccatccgcccgaaacttaaactcatgaatcaaaagctcaaaaggcttacgagagctattaaatatacttcactctctgacatatgggcggagatagactacaatggcagaagtgaggttgacaagcccaatattgtacagaaatgcaaggaaagatggaagagaaacgtaaagccaaagtaaatattcaggtaaaaagataattcaggataacaatttaacaatcaaactttaaacatgggttggggagcattattgaaagcagcagtcagcttaggaggaagagctataaaagctgtagctaaatcggcagggggtgcagtcgtacatcctcagcaaacgctaaaaggattaggaagtgccaccaagtctgcggccataggtggaagcctgggctacatcggttgggagaaactgactacagacaaaagcgtagtgggtattgtcagcgatgctgtcattggcgaagaaacgacacaaaagattggagacacagtctcaaatatcggtgaaggaatgaaagaggtgaaagactctgtaactggtctcactgaaaatgtcaatgatgccatcaccagtgcagacagcaaatggaacggcatgagcaaattcctgcaaggtatttgctccgggaacggtggaaacatgatggggaactttttcagcaatataggcaaagggaatgtctccggtctgagtctcatcggacttgtagtggctgcactacttgtttttggaagattcggatggatgggcaagatagctggagctgtgcttgccatgatgatgataggaaacaatgtaaatatgaacgaggcacttgccagtgagaagaaacgacctgctgcacaaagtcaagacgaaattcaacagtcggagattgcacaaggcactggtggcggcagacgaagataatagtaaattttataaacagatataatatgcaatatacacaggaaatgattcttcgttcggacagtggatactgtatgccctacgaagaaaaaggccgtgacgtacagatgagtcttggctacggtaaacagaaacatccgcatacaggagaacctttttttcatcatggtgtggatttcaaagccaaccattatcttctttcagcagttgcaacagggaagatcacaggacttgggaatgatgccgtacatggtatctatcaggtgacacgctatggagactacgaggtaaaatacgcacacctctcgaacgttttggccaactacggaagtgaagtcaaggccggtcaggttatttccgtaagtggggaaatacttcacatggaggtcaagtataaaggagaagaactcaatcctctggagtttctgaccatgatatacagtaatttgaaagtcatggaacaaaatggacaacctggtgcagtaccacaatttgtgacactggatatggatgtcagaaccatgtatgacaaggacagcaaggagatagagaatctgatgatgcgtttttttccggactacatgaaagacatcagtcttggagcctacacgttgccggaacatacacagttcactttgagaaatattctctcactgtcggctacaaaaaattacttctatgaaaccatccccagtatggctaatccattgggtatgggcgtacgaagtataccgattgcagcacgggtacagaatctgcttatcggtgatttcctgaactatcttgcactgcgtcatcagatatttctttccagtttaagtgatcacgaaaaaaaaaagcacaagaacaggccatagcaaacagtggccttattgatccgttggcagaactcgatattgatgttcaaagctttgatattccccgtatggtgagcgtgtttccggataagtccggtatcagatggtggacaaaagcatggttcaatggtagtgagaaaggagaagctgcaatagagattgaacgtgagctggcaatcaagtttatcaatgaaaacattgaaaaggatgaatggctggaagaatatttcccgaaacagatggaagtatatcacaatgccatagaacagacacgcgagcaattactcaaccagataaatctataaagggcatataaattatcaatcatataaaacagcaactcatggcagagtcagaacaagatagaatattcaggacaaaggttattccaatcatgaacaaggttcggaatgaactgcaagataagatggcagatgagcttaaagagcacacctcatcatttgcaggattgatggccagtgccattggtcctgatggtggaatgtctgccagacaggcacagatgcattctttacgttacactggtgaatggaactcgaaaacggctgaagattatattgaaatggtcaagaaagaacttcaactccagcacatcatcgttgattctgctatggagaaaaagatgatagacaagatgattcaggataagattccacgctcatccattgaatacatcttaaaaaaggcagcaactaacaccatcttctatctccctcaggaagttgcaaaatcaccattagaacatcatatggatgctgaagccgaaaagagatacaacccatctgaatgggaaaagaacacaggtataattctcggatccgtaaccgatctagcatgtatgggtggagccggtggcggttggaaaacagcggccacatgggtcggcggtgacttcctgttatctaaattctctgataaacaggaagaccgttcagacataccttcaatagtgcgaccgggatgcgaggaacagtacagacaagaccaggagaaaatgaagaaacaggaagaagaaaagccacagacaagtgcttcttctgtagagactacaccggaacaggaagaaccagtcgaagaggaacaaccaacagaagaacagacctccccaaaaccggaacagaccaatatggacggatggcaagggttgctaacctctttcgggcttaatggaatcagcgacattggacacaatatcggatatgtactggccatgctgcctgacatgcttgtaggactcttcacgggaaaaacgaagtcaatcaatctgaaggacaatatgatgcccattgccagtatcgttacaggtatgttcgtcaagaatccaatcctgaaaatgatacttatcggtatgggaggactcaatctgctgaacaaggcaggacatgagactttggatgatttcaaagcacagcagcaccctgaaacaggaaccggtcctgtgaattatcggatttatcctgatgaaccgctcgatccccgaattgtcaatcctcagattaagtctaactgtctgattgctataatagacaaggttccttgcaccatcactttgccggacaaagttgtgaatgcctaccagcagggagctttaccactgaacacacttgcaaatgcaatactggccaagaatgaccagatgcgtcaaatcgcttctgaaaactatgaagcaggtgaacggcaaacagttgcacgaccgcttgctcaaagataaaaggataacaatataataatcagacttatggaagagaaaaaccaacaagagaaaatggcagtagcacgtcaagttgaactgtttgagaatgctttcaataaagccaaagaaaatggtggaatatggcttgaaaatgatggtcgtaaagctccgaggctatatctgaagcctttgcagatttctgccttcaatgccatcatattgggtatgcacagtgaccagaacggttacaagaccaaccaatatacacttttttcagaagcaaaaaaacgcggtgagtccgtccagaccaaagaaaagggagtgcctttcctttggtataattggaatgagtatgtaaacaagcacaatcctgacgagaaaatcagccgctcagactatcaagcactgtcgtctgataagcaggaggattacaaaggaatcagaaaccgtgaagtacgcacacttttcaatattgagcagaccacactccctatggttgataaaactacatttgatacagtagtaaaagagaccggtcctctgaaagaccgtacagatatagagtcagcttcgaatgaaatccgtcagggtgtcgaaaatcttctggagcagtcacgaaagaatctggttgatatacgcactgatactacaggtgtagcgcattacgacagtaagaaagatattgtcttcctgccacctgcttcatcctatgaacattatgatgactatgcccgtgatgctgtatccatgcttatgtctgcaacaggacatcaacagagactggcacgtgaaggcatggttgtcaagaacggaaaggtttcagaggatgccatgaaacaggaaagactggtaattgaagttgcttcagcagttaagctgcaggagttgggtatctctgccaaactctctcctgacagcctgaagatgaccgattactggctcagggaacttaaagaagacccgcatctgccggatatactggaaagggatgtaaacaatgctatagatatggttcacaaggctgaacgtggtgaggaggtagagctcaacaacagagtcctacagaatcagatagcggatattaagcacattcttcccaaacactattatgtagctgatgaaatcaagacattgcccaacatagatacaaaagagttcgtggttgtaaaagaacctgaacagaagatggctgatgtggttctcccttctggtgcttcattaggagtcgagaatgagattccaggaatgaacaaaggacgcatcgaacatgcgcttcaaaaagagggctatgaaacggtcactttctacaacatagacggttctatggggtatcgtcccgatgacagtttttttgacggcaaggagatatccgtaaaccgcatgaacaagtggaacatggaaacacttacactgctcgatgtatctgatgccgtcaaacgctccggtgccatagactttgaaaagatactcatgttgcgtaatgacgaagggaaatgggcactttatctgaagcccgaaaatgaaaagagcttcagcgtttaccccgagaaggcagatctgaaccttttcttcaccacaataaaacaaggtgacgaagaagcttcagaaaaagtacgtcaggatatggcccagaaatactatatggctgcccagaacaatccggatattaaggttgaccttttcaaaagcgatgcgacagcagaagaactcgcaaggatagaccgtgtgaacatctttaagaccaagggctcggagaaccaacccagtgtgatattgtgtatgcctacaatcaacggtgagaaattgacagcccgtgaagtgagtccacagcaatggcaacgtatgtggctggcagaagacatgcaagattataaaaaacatcttgcggtaagcctttttgcagatgtgctccgtaaggatcgtacagatgctgttgcggtaggtactgacaaatcagaacaggaggcccagtcaaagagccccagtcagcaaacggaagtacatgaggagcagacggaagagaacaccagacagaacgaatcacttggctcattcgaatccaaagggaataagggcaaggatgaaagttccaagactgaatcaaaggcaaccgcagaactctctccgatgctgaaacaatactatgagttaaagtcaaaacatccagatgcaattatgctcttcagatgtggagacttttatgagacttactgccaggatgcggaaaagaccgccaaaatactcggcatcactctcagtaagagcaatcacaccaaagatgctgaagggaagcctctccttatggccggttttccataccatgcactcgatgtttatcttccaaagatgatccgtgccggtgagagaattgccatttgtgatcagttggaaactacccggcaagggaaagacattagtgaaagacagaaaagtgaacccgccaatcaggaagagagcaaggcttcaagaatgcacagataacatgtaactgcaatgtcaaagaatcaagaatatatccaacaatatgcagagtatgccatggagcagatgcgcagatatggcatacctgcatctgtcacgcttgcacaaggtatctgtgaaagtgccagtggccagagtgaactgtcccgtaagggaaacaaccattttggtatcaaggccacatccagctggattgagaacggaggcaaatatcttgtatataccgatgaccgtccaaatgaaaagttttgccagtatgcaaatgtgggagattcctatgagcatcattctcagtttctgaaaaggaacggaagatatgccggactattccaactctcacctgatgactataaaggatggacaaacggattacaggatgcaggatatgcgtcaagcaaacaatatgcagcaacccttcagaatattatcgagaagaacggattgcaaaaatatgaccagatggtaatgcaggaaatgaaggcactgggtaaatcctttggaactgctgacaatccctgtcaagccacatccgatgatgtttccgtgcaggatactgaagaaaagaaatattccttccctttaaagagagaggagtttatgctggttacttctccctttggtacaagaaaggatcctttggacgcaagtaagtcccagttgcataaagggattgacatccagacaaatcatgaggcagtccttgcaacagaagataaaggaaaagttgtcaacgtgaacagcaatgccaatacaaacggaggacggtctgttacagttgagtacaataggaacgatggcagcaaatatcaatgtacctacatgcacctggacagtatatccgtcaagatcggtgatgaagttgctgccggacagaagcttggcatttcaggaaacactgggtatcggactactggtgaacatcttcattttggagttatatccatatccacagatggaacaaaaagagatattgacccggctgcatatcttgctgagatttcacaaaaagggaacatctcattacaggttctcagtaacggaaaagatctgactgcgcaatacaagagtgcaagtcaatccgatgccaatgtgcagccagatacagccatgagtccggatgagtggatgaagaaaattctgtcctctgaagacagtggggtgaatatgcctatagctgatcctgtaatagagatggccatgactatgttcacttcactcatggctcttgccctccagatagataattcaagtgaggaggaaaagatgcagaaggctactgctgcagctgtcagtaaaagcatagaccttactcctatcctcccatcctataagacctgcaccataagcctgcaggatggtaaacccaatctgtatgcagacaatggagttgtacaactcaacagagaactgagtaatgcagaaataaacaagatccaacagacgcttggcagtaccatgatgaacgatgatgagaaacgacgtagcatcgcctctgttattaactctgccgtggtcacgctgcagatgtcacaaaactatcagaacaatctggagatccaacaaggcagacaggagtctgtacagttgaaataatttgctttttaagtataacaatcaattcgttttattatgattaaatgtaatgtaaccgtgtgtggcaccgtttcccgccaggcacaaatgcgtgctaacaaagaaggtacgcagttcgcatcattcggtatcaatatcgttattccggcaaaatcaggaattaacaagacagttgaaatcagtgtggccaagacctgtaacaacctatctgagttaccaccaattcaagttgggactcgcattgaagtagccggtattctaatgttccacaaaaagggagaagcattataccttaacctgtctgcaactggtattaacacattcaatgcaggcaataacgacggcattaacggtacaatggagttcagaggtactttaggcaaacaaattgaggacaagacaactaaaaatggtaagtcctttacggtgttttcagcttatagtagcgaaaaggatggagataattacacctatacctgggtacgctttatgcaattcgacaaaagaaaagaagcatggatgcaaccaaaagccggaatcaatgccaagggggatttggaattaggtgtgtacaataacagacttgaccttacatgccgcataagcgaatgctctctttgggagaaaagctctaactcttaccaacactaatgactatgacaggtaaaaagatttataattcagatggccgtagcagtgaagataaggccttggacaaattcgcagagatgatgatcttatgttgacctcaacataaaatcatttatgtctgacatagaattatgttgggcattagtctaaacaattaataatcaatcgttctttgacattttgcacaacataattctatctttggaggaattagaggctatctaagaatgtaattaactccttatcctcagaccattttcgtgatggtgtatcggaaacggactgctcacattttttgagaacttctaatttcctttccatgctaatttcggcgtagatgtttgttgtatcaatcgagctatgtcccatccaatttctaaccatatcaatatccgctccagaattaagtagatgagtggcggttgtatggcgtataacgtgaggagatgggcgtttattagcaagagagggatgatttaagattacatcttgtgagtatttctttatcatttcataaatacagaatcggctcataggctgattgtatcggttaaggaaaaggtaatcgtcaggcaacttgttgtctataaattgtttgagtaaatcccagaaatcctcccataaaggacatattctctctttacgccccttgccatgtaatgtcaccattggcattccacgttttgaaggcatcgcaacatccttcactttaacaccaataacttcagacactcgggcgccagtattatacatgaataggataatgacatgatctcgacttcttatcccttgatatttgcatgttttcaatggtgcatcagccaaggcttcgatctcagatttgtccatataggttatcatgcgtttttccgttttctttgaagggataagagtgacatggtgacaccaatctatatgttcaggagatttccacgccagaaactttgcgaaagcctttattgcagctaaacgattgtttcttgaagatacggaaacttttctctcaatttccagataatcaagaaatttcgtaataacgtcagtcgtaatatccgagattttgagattgtctattgcaatacttattaatgtagagacatacgataccaacatacggaatgtatcacgataactcatctgagtgttacgactaaggtttcgagtgacaattaagtactctatgaggaatggtcttagccaatagccaagatattctgtttcagtaattcttctgttcttcattgttcgtgtttttataagcataaaacaatttgtttgcttcctgcaacaaagttggcgtctttgttagatagacggaagtgaaggacacgttaagatgtcccaaatagatagacaacttcggcagtaaatcctgtacgttctttcctgatttataccagttagtaaggacgtcgaccgcaaaagtatggcgaagatcatgtattctaggctgatgacgtcctctatcagggaaataaagacctgcattcttacgaatggtcgcaaatatctgatgtaaagatacaaaattaacaggtttccccttctgattaatgaaaacatatgcatcctctaccattggggacatttgagtacttcgccattgtaatatctcttgcatcaattttgatatttgttcgttgaaagtaaccaagcgagacttgtagaacttactacaatgtatatgcacgtacatattatccatatcaatatcctttatttttaaggataaggtctcacttattctgagtccaagcatatacgtgatcatcaagatatatcgtatacatattggctcattaacaaatgatctatatttgcgatatgtaagcgcacaatcaaacagtctcttcagttcgtcatccgtatatatgtaagcgggataatactctggagctttaggcagaaaaacgggaataggtatgttttgaatgagtcctctagaaaaagcccactcaaaaagttttttcagaatgcagtgctgagaatgccaatatctggtgatgacatttccttttctgtaaaggaaggcattacaatcgctttccgttattgaagttaattctgttgtttctccaatgaacttagcaaataatctcaaagagtaagttgtactctgatccttacgaccaatagacctacgaaacttgataaatgactcaacagtttcttttatactcatagaagctccccccagttaatatttgaaacatctctaagtgaattgagatccacttttgcatatattcttgtcgcttccatacttttgtgacccagtaaatcaccgacatcctttaaggtttgtccttcgtttatcaagaaagttgcatggctatggcgtaaacaatggggacctttgtgcctaacgtccatttcgctggatttcaaatacctatatacgacggaagctatggctgtacaagatataggacgtatcggggctggtgtacaaaagaacaagctatcgcttcctatgtcatttggccttccctgttttaggtaagcgataatagcttctcctacattatgtagaagtggtaacacttgtggtcgacaattcttcgcacgcttaatatagacttgttctttacgccaatcgatgtcgctaatcttcaagtttgccacctcactacaacgtaaaccgtacatagcaagtaacataaaaatagcatagtcgcgcgatgcggatttaccagtttgttctttgactgtttgtaacagtttttgaactttattccacggcaagaaagaagggagattttcttcactatatactttgggagtgattaacgccttatctaggtcggtaatacaccaccccttttcgactgcataacgaagatatacacgaatacaacacaggtactctttcagcgtgttacgttgaaccttgttaatcgtgtagtattcaatgtatttatctatatcttccaatgttaaagggtgttcctggttctccttttctattatcttgtaaaagtaggtgagtatatatctccttcccttaatataggcatgagaatatctcctgtatgccaagtgattaaggtattcatttatgcgtatatctgatattgaaggagatcctgattctggtagcatatgtagctctttaagccacatatttgcaaaatagatgaagaaactataattagacttggtgcctttcttcttgtgagaacctttgtcttccaggttttgccatttttttgctgcatttgagatttcctcattggtaacaatacggaagttctttaaatcaagatactctattagatgaagttgatactgtgcataaagctgaagtgtctgtcttttaaaaccttttgatttgcaatccatcaagaaagacattctctctttataaaagggagcggcaatcagtctgactctgtgccatttgcgctctgcgagataattgatgatgtcgtcttggtaacgagaatctaaaagacctacgtatagtaagaattcaacagccatctcaatgaatttgattcttgaggaagggcaatcatgacgtttccgagaatgataatgatcaggaatgggtgaagaccattgacgtgcagcttcaacgacatcatcaagtgacacaattctcttttcgccatcatgaagatcgaaatattggataaacttgagcgaatacccagcccaccccaatagtgttagccgggacaatccttccttacttttcatagttagaaagtattctcgctcctttaataatggtgcagccaaatgttttttaaggaatgacttgcggataatgatttgttctaacatgctcttataattatatgagtaatactatataatataaacgagcatccaaaattatgttgtacaaaattcgataagaactctaattatcaaataaatatgaaagaaactgacataaacaaatgggcaacattaatgattgagaaaatcaagactttgcagaatgactggaagaagccttggtttacagataaatccatctcttggccaagaaatctttctggccgcgaatacaatggaatgaatgcactcttactcatgatgcactgtgagaaacagggatataaactgcctgtattttgtacttttgaccgtgtagccggtctgaactataccaaagacaagcagggagtccgtcagcaaataaaggataacaatgggcaggaattgccaaaggtttccattctgaaaggagaaaagagtttcccggtgttcatcacgacattcactgttgtcgataaagagacaaaagaaaaaattaaatacgatgactataaactgttgagtgaagaagaaaagaaaggctacaacgtctatccaaagcttcaggtatataacgtgttcaatgtggcccagaccaatcttcaggaagctcgtcctgatttatataagaaacttgctgatgaaggaaaacagatacgtccacaatctgaaggtgaggatttttcctttgctcctatcgaccggatgataaaggataacgaatggatatgccccatcaagcctacctacggagacaatgcctactacagcatttcaaagaatgagattgtcgttcctgagaaaaagcagttcaaggatggtgagtcattctataccaacctggggcatgagatggcccattccacaggagcagagaatcagttgggaagactacagccaacgtcctttggtagtaaggagtatgcccgggaagagcttgtggccgagctaagtgcagccctcgttgcacaacgctatggtatgaccaagcatctgaaagaagacagtgccagttacctcaaaagctggcttgacagcttgaatgaatctccggaattcatcaaaactacactgacagatgtgaaaaaggcatcaagtatgattacaaaatgtattgatgccatgcaacagaaaattgaccaggaacaaaacatagaagtagtccaaagtaatagccaagagcctgtgtactatgcttctgtagcctaccttcaaatgggtgaagacacagacagacttgacaagctacaagaaaagggcgattatgaggcactattgaaggaagccattgagtacgatgccggtgatgccatagacctgtccaacacttacctgtctcctacaaaataccgtggagatgacctgttggtggagaacgaacactatgccgtggtatataacccgtctgttggaggaacctatgatgtgatgcgtaaagtcactgctgaagaagtcagacagaacatcacccgttacggattgcctgataacgccactgctgatgtcaagtccattactggaaaacaggaacagaaaatggaaactgtcgcacaagaagagacgcactactttcatagagggaggtaattctatagacgattagtaggctgtcacttcaccattaatttgatgaatgaggcagcctaaaattgcttacctgcctccgtcggggaagaggtgcagaatcataacagaaaaacatcctttgtccgttaacgtaaagcataaccgttcaaagcgcaaacgcgcttacaggtaggaaaagagacaggaatatcaggagaagatgattcagcgagaaaagacgatagcagagctgacagtaaacggcagcagcttcagggaaaaggatgttgcctttttattgggtgttcaacatgacaccagatatgaatacaggtcagtaacatccaatgtagagggccgtttggactatattctcacatccattataaaataccaacagattgaactaaagaaatacaataatgccatattctatctttcggttccctcccgttatccattggccgatgaggaactggaaaacttcagaataaaaataagggaattactgggttacgataatatgctctttggaatggctataacagatagttcaaatatgaggataaaagccgttttgcatctcatcctcaattgaaggcttttaccgggagtagctattactcccaccattccctcagcttattcagtcgtattttataataaagtctttccatctttcgtatataaatgtcacgttcataaattgctctttgatctttttgaaatctgttgctaactgatgagtgtacatccatataattgctcatcaaagatggtctcactatatcctttacattgcgaatattcatatgctgaagctggttttcagtgatatgaatcccattctctttaatgtgctgcaacagaagaatacagaggtcaatccatttattaaaaccgaaatttccatttccgtcaacaatcaatgaatgagagaaatacgccctcatacaacgcaacttataatattccaactcgtaaagaaagcgccagtcatattgaggggcagtttttgcggcttcaaccaactcatcaatcaacggctgtaattcctccttggcccaagcgctgaaacgtttcttatgataccacatggcacgatgatacgatgctgtatccaccatgagatgttccttctcattttcatctaagcatacttgttccccttcagaagaaaaggcataaggatcctgagcctcccttaaggcatagagtgaaacccactgttcaaattcatcgtcagacttaagttgcttaggaatacacattccacgtttaaaaagttccttcttctcttcctcagacagatgtgaaacatcagccaaggggtactgataattgtctaattctaatcccgttaatttcttcgctccatccattgtgatattattatttttgattatagataaaaatcctataaggaatgcccttgttcttagccagctcaataatatgctgagttcctttggacttaccatcccagaaagccaccagatgtgtggctatttccatcatgtcttcgtttctgagaaagcctgccatacgatggtgcagcttccaattagctgggaaaagaatctttgtcagttcaaattcatcggcaaagcggatggcaagcgtatctgctccatcagccattcccgaaatgatttttatatcagaatcaccacagaaatcctcttgagcgaacaaatgtcccaggctttccttcataaactcataatcggtgaagtcacgtccacctgccactattactttggcagcctccctataacttttacgatacaggtctttcattatttctgccattgattgtccattattctccatcatattcagttttattacgagcactgttggtaatacatacatctacaaagaaatcatccatacgcagcaaatccggtatggaataatccttatgggtacaaatgtcgtgcactgcatggcaaatacagattgaatccagttctggcctcatcagacatccttctgcccatgtttctccgtcgtctaaagtatttacacagtccagttcctcatctgtcatcgaagggttacatccaggtctgtacgatacaattgcactttctatctctgccacccgatgtctgcttttctccatcaaaagactgaccaattctatcatatagtcaaaatcagactggtaaatcctatcctcctcatatttcaataccgagtcgcagtcattgtatgaatataccaacttgccttccacatcacaatcgtcaccatcaagatacatgttcatattggccaacgacatgcgatacatctgagcagtacgatgatacatctggttagtcaaatccagaagtcgattgttctgctttacaaaaatctccatctcacgttgagtggcctgaaacattttgtccaaaacgagttttctactcatgacaagactctcaacagtcctcatttcctgcccgccaacgtgacgcagatagaagtccataggatcagtgccaacatgcaacttgacagcactttccacactccgcaacataccctgcaatttatagatatccgattcattgcgaactgtatctacgaaatctcttgaagaaaaattcatttctgaaaggttttgaagtttacgctacaaaattgattaaaagctacgccgatttatagcataaccttctattttctatcaaaaaaagatacctacgcaatattttggcgtaggttttaagtaactttgccataaataaaacccagaatagtatggcacaaagcttattaagtaaatacgtttggattatagataccatttataaggccgacagaatatcttttaaggaacttaacagcctatggcttgacagtgagattagtgagggagtggaaattcccaaacgcacgttcgacaactggagatatgccatccaggatatgttcggactatttattgagaacgaaggcaagggcaaataccgctactatattatgaataaagaggacatcagcaagaatggtctccgttcatggatttacaacaccttctgtgtgagcaacgcgctggacgagagccaaagcataaaagaccgaatcttgctggaatacgtcccttctggccaggaatatcttcagaagattattgaagcgatgaaatcaaatcagattctcaatataacataccacagttattggaaagacgaagaaaataattttgatgtggaacctttttgtgtaaagctttttcgtcagcgatggtatctggtggcacgcagtacctatacctattatcacaaacagggaccaagaatctattgcctcgaccgtattacgtatctgcaaaagagagaggaaacatttaaaatgcctgaaggttggtcagccgaagagttcttcgacggctgctttggaatcatagccgacaataacattccaaaagaacacgtaaaattaaaggtcagcgcaggacaggcaaactatctgcgcgacctgaaacttcatgagtcacaagaggaaaccgaatgtaatgaagaatacagtatattcacttactacctccgtccgacttttgattttcagcaggagttgctttggaatggtgaagatctggaagtccttgctccgacatggctacgtaaagaactggcggaaaagattaaaagaatgtataacaaatataatatcagcgaatgaaagattttgcagcaatagattttgagacagccaacaaccaacgctcatcagtgtgttccgttggcatagtgatagtaagggacggagaaataacagacactttttactcactgataaacccggaaccaaattattataattactggtgttcacaggtacatggacttacacgtaaagacactgataatgcccctgtcttccctgaggtgtggcggcagatagaacctctcatagaaggcctgccattggtagcccacaaccgtccttttgatgaaggatgcctgaaagcagtgttccgggtatatcagatggattatccctgctatgagttttatgatacactcagtgcttcacgcagggctctaccctgtttgcccaatcaccagctccacactgtagccgaagcttgcggatatcagctgaagaaccatcatcatgcccttgccgatgccgaagcgtgtgcctggattgcgagggagattttataaatcaaaaaaaacttttacctttaaatcatatcattatgagtgatataaataaaaaagaaatacatttaaaagccttttcggagttaaaaggaaagattttccatataccatatcaacagcgtggatataaatggactaaatcaaatgtagaagaacttctgaacgatttgcgtgaatttatatcatgcaataaggaatcaaaaagagtgtactgtctgcaaccattggccattgtaccattgggcgatgaaaggtacagtgtcattgatggacaacaaagacttacaaccctatatcttctacacatgtacctgtacggtaatgaaccttacacatttgaatatgatcgtgacgacagtaacattccgtcaagaagtgaatacctgaaaaatattgcttcggaaaacgaaaagacagcggataagaatatcgacttcttttatatctatacagcatatcattatatttctgatttttttttggatgacaaacttaagcaatccttcagggacttgcttgaacgccccaaggatcagaagtcattgcaagtaatatggtatgaggtagaaagagccagacaatatgaaactttcagaaatctgaatagcggcaagatacatctgacaaatacagaccttatcaaggctctgttgctcaaccgtgtttcaggactgcctcaagttgaacggatggaggctgctgccatattcgaaagaatggaacgtgacttgcagaacgaccatttctggtatatgattaacggcaatgaactgcgggaaggacaaacaaggatggatttcttgttcaaccttgtggctggatgcaaacaaagcgactatgacattgattcaagatggtcgttcagaaattacttcaatgactctaagaaggaaaatttatcgcagaaatggaaagctgtacgacatacttttctaagattgaaagacatgtatgataacatctacagctaccattacattgggggcctcacgtataattcaaacaggaatcctatcaacaatataacaagatggcttgcacttaacagggaacttactcattctgaatttatcaacagactaagaagcgaaatcaagactatacttaccagaaaacataaagccattacagaatacagttactatagcgataaaaaagatttacgtcttctattcctgatgcataacatcgaaacaatactccagcgatttgaacagctgcatgaagacgaacggttaagtctcgaaaatgagtatgaaaagttcccgttcgagcttcttcacaggcagtcatgggacatagaacacatttcatcgaatacagattccgacttcagaaattctgcagacagaaaagcctggctagaaagcataaagcaagatttaggcaatgaatacaccaaagatgaaaacagtaaaataaaagagctggaaatgatatacagtacaagtgaaaaacgtgaagactttaaccgtttgtatacagccataatgcgacaatacgatgataaaacggactctataaaagacaacgctcctgacgggaaagacaaaatgcagattgggaatcttactcttctagacagcagcactaaccgcagttatcataatgccttatttcctcgcaaacggagatatataattgttgccgatggcatttccgataaaagcgacaaattcgagagctcactcacacctcgctatatccctccatgcacacgacaggtcttcaccaaagcatataacaagaccaacaaactatcgcttaatgcctggacgcaggaggatgccgatttttatgtaaaagacatggagcagaagctcggatattatttcaacaacgaaaaaatataaaagctatgaatttcatcgagtcattcaacagtaaaaccatactgatacccctactacagcgtgactatgtacagggaggcagagaagatgtgatagtgccattcttagattctcttctcaaaaccaatcaggacctgaactacatatacggatatgaggaagacggatgttttgtaccggtagacggacaacagcgtcttactacactttggcttctttacctatatctgtattcaagaaaacaatgtaaaaataaatttaatataaatatcagatttgcctcaagagaatatgccgaagacttttgcgaaaggctgtcccttcatttggagaaactggtcaaagagaacgatgccgattcattggataaagtgatcgtcaatcaaaactggttcatccaatcctggctcagcaacacaagtgtaaggaatatgctggcaacacttaaattcattcataggaagataaacgaagagaattttgattcaatatggaatcgtttggtcgtatcggcaactccaggtattacctttgcatttctacaaatggatgaaagaaacggtttagacgatgacatatacatcaagatgaacggtagaggaagaaagctgtctgctttcgaaaatttaaagtcgtttatggatgaaaatgtggctggattgttttttgctgaggattggaaaatgaaaatggacaataagtgggcggatatgttttgggataaccggaaccgccagcaggaacatcctgaagagattgacgatgaacagctgtactgtttatacaatctcctcatactctatcatatccagaatgacgagctccttgatacgataatcagaataaaggatgaagaaacgcttctatacgaggagttgacctcattcttcggaaagaatgaaaagaccgaagtcaaggatgtgataaagtctgttatagaaagactgcagaaagcaggcaatttcccgctcacctggtttgagcgtcttaacttgctatcacccggcttctttaaatttgcttataataagcttaacacgctgacatcatattgtaaaaaatttaatgagatgcagctttacattggagaatccgattccgaaaaaacatccaggacctaccaactatgtatgtgcgaaggctctttcggcagaacactcccattattatatgctttgttggcataccaggaaggcgaaaccgagctgtttgattggatgaggacaatgcggaatctcattctcaatactgttataggcagtgaggatttaccttcaataattaaagacatcgacgctttcagcacactgtgtaagaatagcaatatatatacggtattacaatcggatgatgtgaagaatgtattggataaattcaacaaaagtcaagtgaaggaagaaaccagaaaggcttctatgcccgaatttaaagatgaaatgattaacatggagaacggaagattcttcagaggtagaataggtatcttgttccgtatgctaaaagagcaagaaggatatgactgtatgtcgaaagaaaacgtgaaaagctattcatccgttctgcttgaattattcgacggtaatgataatggactttccacaaaattcgaaaaggattaccttttacgcagagcattaatgtctttccctccatattactttgggaaagaagtaagctcatgctggtctttcaacaatggtctaactgagtggagagaatacataacccaagaagattatgatataagctccctacaacagctgatgaaaaaattacttatccctgaattcaagtccggcaaagatttagtaaacgtcttatcagaatatattactgatatttcttcaaacttcgaagaggatatacgtaagaaagataaagattcccatcggtattattttatcaagtatcctgctatttgggcgttcatggatacaaaacggtgtgtttggaacgataataattatgacatcgtgctaaaatcggcaaatggaaataacagtaacaggatggaactgcgcacaatatctttgtttttggattataaagagaaaaaggattccataaatcaacaaggatggagcgtttctatatggccaaaagaaaaatcgtgtatgtatttcgatttcaaaatccccggagaagagaatagaactattgccattgatgtctatttttatgatgacaatggtaacaggaatagtgaagattgctatgcattcgacctgtttatccgtccgactcactatgatgccataaatgatgaagaaagaaaattatttgccgataagtgcttcacccaaaacgaatcgctgttctcatctattattccagaatatagtgaactgtttaagaaaaatgataatggccgtttgaaaagccaagtcctttactcaaaatataatcttaagaacatactaacgaagattttgagtgatatcagttcctattataaaaaatagaaatattttcaccattccggctttcgttttgcttagggtagtgtttacattccgaatgttcagatttatatgaaaacaaaattcacatattccactttacacgaatccaataactttaaaatctggcatattaagtaaatgacagttatatggcatcttgtggcgaattggaattgaactgtatcataggcaatgacaatgccctatcattatacagaggagttttattttaaaaatcgatttacaacttaagtatcgaagaaatattatgttttcgactgttaggatctaaatcagataaggatgccaagctacttaatatgtgtgtagcaaaatatacaataaaaggctttacaattttcagcagattaccttgtcatcaacacaaattgaactaaaccggatgagcatggaagttgtttagaaaaaaatataataggtaatataaaaggtatgcaaggaaaatccgagcataccttctctatgtaaaccataatttgatggataaaatacaaatcaaagtctcacgactttttagcaaaagtttcgcattatctattatcattcagtaagcatgaccaccgtaaaacggttagagtcattggccttaaacttatctattccaccaaaactgtgcagatgaattaaaccttcaggtacccctctatcaataagcttttgagctacatatctggcacgacgctggccaagctcctgattgatggactgtgtaccagtggcactgtctgctgctccggatatggtcactcttaaattatgcgccttggatatttcagcgatgtcatcaaggttcacaatctgggattcatctacaagcctgtcagaatttagctggaagaagaagtacaccggaacacccactgttatctttgaattacctgaatttactattgagtccaatgcattattatttacagacataagattatcagatacattttgaccggcagacaaaagtgagtctgactggcagttcccagtccgtacatgcgtatctacaagaccgacttttgcatcatcatccaaattttcagctataccgtcaatacctgatttgctttctggtgagccagactttttcccggacaaccgtgctcttagtgagttaagcccactatagttattcttgggatagactgtcagcacctctttctctctagacatttttttctgcaatcgtatattctcatccttcatataggagatgtaatctttgagataagcattctgctcgatataaggtgtagcatcaactacacgcttccatccagcctttcctaatgtgatggagagaccggctgagaccgtaagcatattatccttgaattttatagagctacccatattatcaaaattctgggctgtagtcagtccactgacaccagcaacaagttttaccctgttgccaattctgtaacctatctccagtccataggtaaaggcgaacggacggctgccatctgaaccactgccacatgagcaaggatcagaccagtccgcattatgaatcatacccactcccacataaggaacaatatcccaaagagagagtccgtactcattctgacggagtcctgaagtcagattgtacatcaggtctgcatgacagaactgatacttcatggatttgaactcagcgttcttgaacgtcagtccctggaaacctacacgtccaccgattgcgggtgtgaaccactttccaacacctaccttcaaggcaggtgttatccggtcgaacacatcaccgcaaccaatgggtgatccgagaaaagctgaagccccgcccttaatttctataaaccaatttctaccccagttggctgcttcgcttacattcttcagatatgtaggattcataggcaagagcatctgctcctgactgaaagtattttgcttataaatgctgtcagtattgtgatggatgttacttgcagagactgtcattgcagcaagacatccagttaaaagcataagaatattctttctcatatagtttatactttaatagtcgttgatactgtcataagccaacaggcttaccattacattctcttcttccgtttgacagatggcgcacacatcttgcgtgccattgccagacacctacgtgcccactcacggtcatcatcttccggccgccttccccaaccagtggaggggccaccgccacctccgtgagtctgggcaatggtcgtagcatcgtccacataaccgcacacaaggttcaaggcaaccatgacaacatgatttccctgttctgccagttggcagatcagtgtatcgttaaacaaggattttgtttcctccggcagatggtgatagcgggatgtgaactcctgtgacattgtgtcaagcattgcaccgttcaagtgatagctcatgttatgagcccatgaaagttcagactgattggccttgtcttccagttccctggcttgctgctcgatgtcagccttatcttcacgaagagcttcaagcaaccggttagtctcatcaagtttcttttccttgtctgccagtttagcttcaacctgagccttctggtattcgagactttgaatcttgcgtgcaatctctgcactgatactctcgctgttggcctgcatttcccgaagaggacgaagttcatcttcaagacggtctttctccgtcttcagattatcaatcatggtcgtaaatgacttctgtttcttctgggctattgccagttcctcgttcagagacttaagcaacttcctgttgttctccaactgggcttcaagtgtcacacaggcattggccagccatcgtcggtattcctcagtagagcgatgcctcgcaccagattctacaaccgacacccctcttgtaaggccccatttttcattgaccttcgcaagctcgtcgtgcagggcaagcatataattcttaaactccagacggttctgtccatggaaaatctgcttgaaagcaaacttgccgttctggtctatcggtagtagagcacagtgaacatgcgggttcttctcgtcacagtgaactataaaggaaatgatgttttcctctccatatttatctgccacgaagcgataaatgtcacgtgcccattcttctatttccggcatacgccttacatgttcgttacctcctttgctctcaaagtcaactacctgattgccgaaggccagctcacgcatacggtcggttgagcctccgaatatgaagttgaccactgtccggaaacgtggctcggctagtccttcattcggatccttgatgccacgtgacgcaaggttttctgccatgcgttttgtcagcggacgcttcttatctatcggtgtgactatgccacctttttgtacctcgaaattaagatgttcacggctacggtcatagttaccctcacgcatagcctgctcccatcctttatccgtccaggcacgtaactcctcattgctcgtctgtgagagccctttggaagtctttatatccatgacttgttttgatgtagtacccataatgacaattttattttttgcgttattctgagccttttttcagtctcctttgcggtcatacgcacacttagaaaactgacccagcttgctgtttatctggtcagccctcccgccgcttcatagcggtcggggtattaggcttcccgagactgtaaaaaagtggcacgtgcaagcacgctgcctgtcgttgcatctatccgttagcgggacaaagacgaagtgtataaaagcgtatgacatgccgtgcatcgttaataaggcgtttaatccgttccgttttcaatagaggaagtgcccccaggcttatcatccgttctgtcctctacggggcttaaatcaggtcgaggagggtcatcataataaaatgttcccgggtcagatacgtagtattcaaatatgcagtcaaggagaataacttctgctttcgtataacgggatacgggttctgccatataacccggctttctgttttcacgtatggccacagccagaatgccaaggatttctattactttctgccagtcccatacatggtcttttccaaagagaaggccgatggaatccgacagttcttcaggcatttccttctccattttcaagacctgaaatatggactttgccagcgagtcaaatacttgaccctgctgtttgagaacatgtcgggcaggtctgcctccgtcgttctccgttaccgccaattccataaccttgttgaaataacaattatatgattgggccacctgaccggcagtgttgcgtcctttaatgaaccgtacaaactgaagtgcgttgaagtccaatatatcagacggtgtctcaacaaagagagaaaggcgttgttcctggcttacggaaaacacatagctttttgagaattgctccatggttagatggcccaggttggcaagaccggtcaggaactgacggactgtagcacgttgccattgccacttccttgcaagttcagatatggtggcaataaactggccgggaagtaatttcagatttcctactacaacggatgtggaatatgttcctgatgtcgctctggtgagcagatcacaataggcttccagtttgctgtaacggtcctctgatttaggcttcagatactccaacagggagcggtctatgccctgtgggtcattcaattcaggagaagaattgtttttattgttagtcatttgcgtcatttttagattacatttaaaaagtgggaaaaaagcaagcaaggaatatatattccacatgtaagtggcattaatagtagttcttcattatccagtccatctggcttttaaaactgtcgcagtcttcaagtacgcttttctgctgaaggactctttcagacggataaaagacagctgccacacttagcaggaaaaaaagctgaaacacactgttcatataaggggtggcataacataccactgctatcaggagtgtgataagccaaaaccgtttcctttcatgcagaatatgaagggtactatcggcaatccttctgttcaaaagtgccagcgtcaggatgcttgacagtccaactgccagattgggctctgtcatacaacagcaccagttgatgaagatgagtgtaagcatcataatacttaaataaaattttcttgcactgtcaaatactaccatcctccacatgaagctttgcatgcagcggtacggttttttatataagcaaaaaaatgccagaagtagcaggaacgggaacaaaaaacggatgatggttaatgtatgtatcatagtgaattcatttagttatttgtattctcaacgtgttcctgctcttttctctggattgactccaaccgttcagctatgcgcctgttcaaccggacattatagctgaacgatttctggtcaatagtggggtcttttgaaagttcttcatccgtttcgatgagaagattcagataagaatccaaattggaatcgtgattccttttctcatctcctatggcataatcatcagtcaatgaagtcatcttgtccaacgtatcagggtcaatatcatcggccaggtcataggcccttttaatgcttctcataaccatcaggcaagagaatatgaggaaacacagtatagccttgattattatattcaggtcaaataccatcatcgccagtacagccagcaggatgactgtaaaataaaaaacataaattttcctgttagtattcataatcgtcaagttcaagttttattataccgaaagaagctttctctataatgtattcgacatcacgcaaagtgagcgcatcatgcttaatccgttcagaggctgaagggtcttttttgcagagagccaacagacccatgttcaaatcgtattcattgatgttccaggtacaggacctcttgaaacagtaatgttccctgtagcttttcaaagtgatagctttaaacagcagcggcttcagcattccatcctgaagtattcgcatctctaccagtttttctgtaccgataacctttatccatgtcctgtttttctgtatgatgtctgcaatgaggtaatacgttttcctgttcattcaaagtccgcagttgaagtcattcattatctggacatgctctcgcttttctatgaattttccacgacgttcatgtagtcgcaaatcttcaaaaatgtcagcagacataacctcaatggaattgtagatggtaacatataactcatggataagaccgtccgtatgtgtcttgcagtttatcttgaacatacgttccgtcaccggataacagtaggcgcagcattcatgtccgtatgcggtagcggatgatggcactatgtggtaaagaatggcaagatccgcattcatctcaaacatgtccaaaaccttttcgagaggctgaggttcgtgtacttcataaggaagtacggcataatcttcgtaagtcttgatttccccaagccagtaattatcaataatggctggcaacaatatgggaccggatgatctgaattttaaaatagcttcctgtaacatgatatttatatgattagatggttgatatgtataatcgaattagctgattcggtatttttgtggtcacatcccgatcgattaagtgtttgctgtctaatctggaaatgatagccggataatcctttgccatatccgtcataagccgaatctgttccggtgtcagcattgttatggcaagggcatctatcgagagataaggttgtaacatcatccacaagtaagcattggcatattgcgaatcctttactataccacgtttcagtttctcatgacagactttggcattcagaagcagacggcggcctgtcctcatggacatataggtaatagtttcatcagccttgattttaccatttgatgcttccttataaatgctgtcacaaatattggccgtcatatcagtaatatccgccatacccaaagctgagcactcgtcaatggaagcaagaaagcttcggaagaagaagtcttccatacggataaatcgaagaagcgcatcttctgagtgtaccccatgtaatttatatgaaagcagaaactctgagtaatcggcaagtaagtctctaatattcccggtatatacaggaatgctatccaatgaggaaaagaatactgttgcatgtcgctttaatgagtcaagttccttatcctgaccatagatagaagtatgaagtttgacatatgccacatcgcttagagtaaagttgtccgcaagctccatcaacctcgtgcgaatggaatccgttatactgtcaaacctcatggtcagaccggcatgagccgtaaacgaagggtctttctgaataaatttgtagactgtgtctgagcattcataccacagattgataaatgaggcaagttgctcggcattgcacgtttcctgtgatctgacagtcttataaagattatcgtattcattcagagcttcatcagaggactcaaaatcatatttctcatgattgttgcatgagtaaaacaagagtacagagcataaaaaaatcaagtgaaagattaaactcatttgagtattttttctttcacttgatttactttctttcacttgttttcctgaacctgcgtcagacataccaatcaaaccgctactacagtgattcttaccgattaaatttctatatatcattggcataattttgtttgttatgtggcaaatgtatagataaaattccacattgtcagtataaaatattcagtttatactaatttatatttcatactcataatagtatgatttataatacatatctattgataataagaagttgttaaaaaagaagtcgattataaaatctgtcatatcagtatgattaccaatatgaatataatttatacctttgcatcagagtcgtgttcattatactcttggagaattatcatactatatatttttcaagacaagataagacatctatttgattatcagtcaaaacctttataatatggcaaagataggttacattatggcaatatcccagtatgacaaactggaagaagacagggagtggatgaataacttcggatgtatacgcattgtagaggagtgcgatgagaacgaacgcaacaggccgctttggaagcaactcatggttgccctgcaaaggggggatgaacttgttatccccaaattttcaaatgccatccgtggcagtcgggaactggctactttcctggaattttgccgggtaaaagctattcgcgtcataagcatacacgaccggattgattccaagaaccagcttttccctgaaaccaagccatcggatgtgctggaaatgatgggtgccttacctgaagaagtacttgctttgagaaagactgccgagcatatggtgaacctgcaggcgaagatgattgcatcattaccgaaggtttcttccacaaaattacaaaagctcgacagagaaaagacagttatcaatctgtatgcagccggtcatcctatagatgagatatggagagcaagcggcttcaaaagcagaagttctgtgttccgtattctgaacaagcatggcatcaaactcaatagaggaaaccattccggacctatcaaaaagaaaaatgaagaggatacatcgaaagatatggataaaagctgactataatgaaaaagatacttttccttcacggattctttgccacaggaagttgtccgatggcagttgctctgaaagaagcatttgaaaatcatgcctccgtcttaacgccagaccttccgcttcatcccaaggaggcattaaaacaggtacgctcaatcattgaacaggaatcgcccgacctgctgctgggtaacagctgcggatcttttcttgcgcagatgctcgccccgatagtcggcatcccggcattgcttggcaatccgcactttgagatgacgaaattcttgaaagaaagaatcggtgagcatcagtacaaagccccacgcaaggacggcaatcagacgtttatcatagatgaagctttaatcgaagagtttgccaaactcgaaaagattcagtttgactgctgtaatccgtattacagagaccgtgtctggggactattcggcgaacaggacagactggctcactatgagcccatgttcctggagcattacaacaattcccatcatttcccgggtgcgcatactcccacagaacaggaagtgaagacctggtatgcgcccttggccatgaagatgctgatggagtttcctaaaaaagaagaaagatatttccgtcatttcaagggtggtacctataaatatatccattccgcttttgacagtgaaactcaggagcggatggttgtatatcaggctctctatggagagaaatcttattgggtcagaccggaaaagatgtttttcgagactatagaaagggacggaagacgcttttcaaggtttacggaaatagacatctgagtgtttaaggtttatccgcatagcagctataaccgtacgactgcaacgagtaaaggaacagaagaccatccctgtggctcctgttcctttgttcttatcactcaatttccgacgtaatgaaatcaatgtgaccggcaaatatatcatcggcatcaatctcatgttcattgccccggtcgtttttctcatctcctatgatggttattcttccatcattgctaaccctcactgcaaggattaccacatcacaaggctcatcatagtcatacgctgccactatcgggcaatcaccctcaaagtgccattcatagccatcggcaaccttctcaccatattggcgaattgcagaaacgagctcttcctgttcgcgatgctttacctcctgcacgctatcatagattgaaaaattcttcaacctggtatccctttgttcatgtacctccttgccattctcttcatctatgccaaattcatgaaactgcaccggaacataatctgcaggaactgccatccatgaaatgttattcaagaagtagtcgtgctctacaaggaaaagttcaacgtcctctccaaccatattctccggaacgttcaaaacatcgatgcggacatttgcgcaatccacaacaataatcttcatagctgtccaatttttaagttatacattagttttcatcataaagtcttgacaagaaagactgaagttctttatcctttacctctctgagggcacaagatttgaaactcctatcctgttctatcttcaataagccgagtccgtacttactcgcatcataagtgacatcggccatttcagatgctgacatgtagccgtactctgtttcatgtagaccgaccactataccatatagggtgaagtcatctccttcgggctgtccttccataatataccaacggatattgccaaggtgaaacactgcgatgcaaagcgcatcctttccttttgcgtcctgtgaatacaggggataatcactcagagcctctctcagttctggagttaccagacgattgttgaattttgttactgtcataatatctgaattatttatttcccttttgttacagcctttcagctgtgtgtcgggaagatttttctgcatcagaagtttggagaaggcaaataaggcaagaatggcatgaagaatactctttaagtgcctgtcacttaaaggaagattgttcacaagacacgtcttgcagtttgacagatccaagataacttcgctgaaaaattttcctctgacacgacagcggatgtgcttaaaggcagacatataacaggtgaaaatcactccgggactgcatgtaagagtgagatatgggctgtatataactgataagcaataacaatattaaggaatttttggaggattctcgttatctttgtatcgttttccggaaatataatgagtacagagccattacgacaatatatagccatagatctgaaatcattctatgcttcagtagaatgtgttgaacggggattggatccactcgacacatgccttgtcgtggctgatgcttcacgaacggaaaagaccatctgcctggctgtttcgccggcattaaagaagtatggtaccggaggtcgtcctcgcttattcgaggtgattgagaaagtacgtgtggcaaacaggcagcgaggtaacagtggaaaatcctactcgaagaaggagctggacagcaataaaagtctggccatagactatgtggtggctcctccccacatggctcactacatagaatacagtacaagaatctacgacatctacctgaaatatataagtccggatgacatccacgtgtattccatcgacgaggtcttcatcgatgctaccacctatctcgcgacttacaggatgactgctcatgagctggcaatgaagatgatccgtcatgtcctttcggatacaggcattacagctacggcaggaatcggtaccaacatgtatctgtgcaaggtagccatggatattgtggccaagaagatgccacccgatgaaaacggtgtacgcattgccgaacttgacgaaatgacttatcgcaaattgctttgggaacacactcctctcacagatttctggcgtgtaggcaaaggtattgccaaccggcttgcccagtacaatatcctgacgatgggtgatgtagccagatgctctatagaacatgaaggattcctgtaccagatgtttggagtcaatgctgaactgcttattgaccatgcctggggatgggaaccagttaccatggaatatgtgaaagcctataagcctgaaagcaaatcattgagttccggacaggttctccagtcggcttacactacggatatggcccgtaatgtgatacttgaaatggccgacagtgtgtcgctcgaccttgtggacaagaggctgctcactgaccagttggtgcttaccgtcggatacgacattgaatcattgaccaacccttcaataagggagaagtaccatggtaagattacaaccgaccattacggcagacaggtgccggtcaatgctcatggcaccatcaatattgaggagccgacttctgcaggcagtatcatctccgaaaaagtggctgaactgtacggccgcatagtgaatcctgtcctactcgtgcgccgtcttaacctgtcggtgaatcacctcgtacatgaggagcagtataaaaagcaacctaaaatcgtccaactcgatctttttactgattacgaagagtcagaaagacatcggaatgctgacttggaaaaagctgagaaggaacgcagacgtcaggaagccatcctgagtataaagaagaagtttggtaagaatgccatcctgaaaggcatcaactatgcagatggagctacccagaaagaacgtaaccaacagattggaggacaccatgagtaaatatgacgacataatcaacctgccacaccacgtatcgaagaacaggacacccatgtccatggagaaccgtgccgcccagtttgccccgtttgcagctctcaccggtcatgacgaagcgatagcagaaacagcaaggctgactacccccaagaaactcctttctgatgatgagatggcaagtcttacaagaaaactcacctgcgtcattgaacaggtgccgggacaggaagaatacactttcgtgcattacgtacctgatgctcaaaaagagggaggcaaatacgtgtcaataacaggtacagtcaagaaatacgacgagatgacaagaacaatcacgttatcggacgggaaagtgcttctgattgataatattctgtctatcagaagacatggtactccggagttataacgagttataccgaagtttcgttcaccaaaatacgcaaagacccagcaaggataaaaacttatccctgcaatgaaagcgtgattgtcctgtagaagctgatggcaagaccactcctactcacctgtacttgacttatatatcaagattgctatctgtctcttctgaaatcgttccgttcatctccattccaccatacttccacgatgtagaagaaaagacggaagacgaaaaagacaataacagtatcaaaaatttcattcatactcgttccatttaaaatcaatacacattaataatcgggatgctcctcgcccgtgcctttttaacggtgtagtatgttccacctttcccacggccatcataataggcaatgagatatgaagcattctcaaccataaactcgtcccggtcaaggaagcacctcggataatagcagtcactgagcacaattaccttatcagccagttcaagcaaccgtctataaactcttttatcatagatattatatctctctgcctggccttcaaacggtatggctgcagtcagagatattccgggcaaattacatttcagcgattgtaccaactgtgctgccatcaggtctattcccaaagcaaatccggaaatgaaattcctgatgccatggtcataggcttcggatattgctgaggtaaggcgttcctgaataaattccctttgggaaaagtcatagaaccgatgtcctgtaaaagcagctgagactgtcctgtcaaatttcaaatcattcataattgtcattttagtacgtatttatagcttgttttggcaaggaagatgccgttggtcacatgagctccggcctgttctaattgggagacataggcattaaaggatgcacccgttgtgactacatcatcccaaatgcagacctccttgttcttgaagaaatcagcatcaatctcaatgttgttctgctcatttatccgtttggcacgctcttccttttttatctttgttccatggactgcagtacgttcaccgatgacactcacatgagagaacccgtcaatggctccggaaaacttgcatacaagctcggaaaaatgtctgtttctcatttcgttacgttccggactacttgcagggatgcacgagaataccacattgcatatcttacggccaaacttctttacaaggaactttgccacgcatttggccacctccaggtggttgcggccatccttgtagtcatagacaatctgacggtcaaaaactgcgtccattcctatgttcttgatgcgtgaaggaaaatatcgcaagaaactaatcagttccttgtcttcctgacctttgatgtaaacattcactgtgttcatactgcactctgattttgtttcccttttgttaagtcctttcggactgtgatcgggaagttttttctgttttacaaagtgcagacaaaccaatacagcaagtcttcagtggacaatactcttttcaaggaaaaggaagattgtttactaagaacgacttgccaatttggtgatggatgcaacaactttgcagaaaaaagttcgctgaatcacaagtaggaatgaagacacaatggttaaaatactagtatataggaactttataactgaatacaatcattataactgtcgggtgggaaatgtcctgcaccgccaacagcaagtacggcatcaaggagctctccactatctttgatagcggaatgctcctgacgtacctttgacagaggggtgttctggatatagtcgattcactcgaccatggacagaatacttctatggcaaactgttagaggatgcggacattggtgtgggcgaagattacagaaatgaaaactctatgattacaaaaaccaatggaggcgtcagctgataaagaagtaagagtatagcattataactgtcgggtgggaaatgtctcgcatcgccaacagcaagtacggcatcaaggagctctccactatctttgatagcggaatgctcttaccgtacctttgacagaggggtgttctggatatagtcgattcactcgaccatggacagaatacctctatggcaaactgttagcgaatgcggacattggtgtgggcgaagattacaagaaaaagaaaactctaagattataaaagtcaagggaagcgtcagcttataaagaagtaagagcatagcattacaactgtcgggtgggaaatgtcctgcaacgccaacagcaagtacggcattaaggagctctccactatctttgatagcggaatgctcctgccgtacttttgacagagggatgttctggctatagtcgatccactcgaccatggacagaatatctctatggcaaactgtttgcgaatgcggacattggcgtgggcgaagagtaaaaaaagttctacaaataacgttacagattcaaacatatatcagaactgactacgtcttataaacaggaattttggctatggaataacaaccaacgacttttcaaggaatatattcactactttccaacctggaatgtaagtattaaaagaggtaatcaaccgtcagcatactcgatcttcaaacagtccacatcggggcttcccgatatggtctgtttgaattataactatatcagtctatgtcataacctatcacacaatcatcattgataagcagataataataaccgttaccacaatttcggtattccttgctgaatccggctatcatatcaccattctctttcggttcacaccaaagtgtcccgtcataaccgcaaaagtcaaacctatagcttgaatacttctctttctttttgaaggcttccctgaagcatgccatcaccatgtagccgcaatacttctcgatggtgctcaatctgatacattttccgtcaatacctgttcctgtggttatatggttctcgtaaagggattttgtcaaatccgcacctgcaatcctgcgcaaccaatcatttgtatgtgtggcaagtctggcaagtttctggtatttgagaatcatcttcttttctgcctcttcttcattttcagtggtcggataatagactttctcaatgcttgaccaggcattgaaaacataacctcgtttgcgtttaccttttgcaataatgccaatcactccctctccgtcactgcggttaatgaacaactttctacgttctccactaattctgacatacaatgatgtggggttcttttcgttgcgaagatactcttctgccggatgaatcttttgtacttccatatctataagtattaaaattaatcatttcccttttgtgaaatcatgacaatttcaaagggcttcaaattttcacgctcccgatactgtgagacatggaagataagacaagtaaatggctgtagatttgtatggaatacccaaatctctgatttgcggaaggttgccataccaatctgagacacattagagaatcggtacttggcgttcggacattcacagtaattttgcggtgaaaatctgacaagccgtgaattgtcagcatacaaaaagcttatgaaatatgctttaatcaattacaagaaggcgaatttagattcaactataaagggtttatttcatttgtctatcaatgatttagagaattatctttcattcatccaatgtccacatgtattcatgtccacacgtttacatatatacacctatacaagtggacttatatacatgtttacatataaccatgtattcacgtccatatgaatacatgtatacaaaaagccaccaccaaatcataagacttgatgatggctcaaagctatataagacaatatcaattgacgtaggcgtaatttacgttgaaataggtgtcagaaacctttgcagtcgtaatgaccattgacctgtctgagttcgtgaaacagtattcaagtgttgcctcgttcgccggaacaatcagagaataatgttccttcaaatagtcgataaccagacggctattagctatcagctctgtatctattaccgaatacaattccccatttgaagcataaaagctatataggataccctcattaccgttgccggttttgtaagtgagttgaatagaaccagctattgttgcctccgatacaagaccatatcgcttcattgaaaactccatatagttcttgacctcgtctatggttgaactttcaacatgataaggctccgtccatactttcaactccggctgaagctcttcaacatcatccaaaatgttgtctttgccacaagaagttaataccaatggtactgccattaggaatactacaatggcaaatgagaagtatttattcatattcataatattttgattgttattgacttgaatatatctgtgtattcacgtgtacgtgtaaacatgtatatattgctacacgtacacatacctatacgtacacatggctacgtgtatacacgtttacattacatcattgatgcttttggacttgactttccgagccttgccatgcttcgcctcgtatgcctcgatgccctgtttcatcacatactccataaaggcacgtatagtgaaaccctccttgtaagctattgcctgtaccttatctacaagttccctggagcagataaaggagaaatgccgccaggaattgtccagttgctctttacgttctgccttgactgaccgtttttcctgtttcggaattggcttggtctcgggtgtttgttctactgttttattgtcagggctgatagcagcactgcccaaaatattgccaagcagaatgtccatattgttttttgccatagttgttattggttacgtgaaagaatttcctccgtaagtgcaagataatcctttgcaccgttggaatttaaatcatactcgaatatacttttgccactaccggctgattcagccaaggcgatattctcacggatgcgggtattcatggtgatactttcgtaacgctcctttacagcctgttccactaccttgttcagtttacgatgattgaatctggcgatgaacacacctcccaggcgaagcgacggtttgacacgttgcaaggtggtgacaaatgcgtcaagcatcctcatgcctttcaaaggaagcagctccggtgtcatcggtacgatgatctcatcagccgcgataaaggcattggtagtgacaataccaagagaaggcggacagtcaatcaggatatagtcatagtctttcctgagcggttcaagcagacggctgagcagttgctctcttgccaacagattggtcagagctatttccgcacttgccatttcaagggaagaagggacaaggtcaagattctcccggatatgttttacaggcaaaggaacaccgtttaccaatgaatcaaaaatgctcgtctcaatttcatcctcattaggtatgaaatacagtgtcaggtttgcctgtccgtcaaggtctataagcaggactttcttgcctttcattgccatacaagccccgatagaggcggttgaagttgtctttgatacgccacctttatggttggcgaaagtgatgattttctgtgccatactatttgtttttatgtttatatgtttcaatgtgttcttgtattcctgtttacacgtgtacttgtccacatgtatcaatgtatacaaaggtaaatgtatgatatacaaacacctaccaatgtctcctaacagttgaaaacagtcagggaaagtatcagggtcataataatatgacttcatctttgctcactaatcgttgtgctccgctgattaaccgtacaagaagttgttcgttatacactgccacaattattccatggctacagcccctgcatggggttataagttcgcaagatgctccaatcagttctgcgctgtacctgtccatattatcttgtttttatgcaaggacacgagacttgcctcatgtccttgcgggtatgttattcgaatgtaaaagggtggatgtagaaataggtctcttcgctttcgtattcatagctattgataaaatccaccatttctttttcactgcggtctccctgtccaataccggtctttgatgtccattcagctatggcatcctcaatggtgtcaaaaacatcctcacatgcatcctcgaaaggttcgccgtatgaactcacacaacattcttcgggaaagaaatccccctcgtcatgggtatagaacaaatcacatccactttcgcaacatctgtatgaaatactcagttcatcattcaatatccggtttatttcaaagaagagttcgttacaggcatcccatgcggtttctgtctcaaatgaaagaaggaaataatcattctcttcgtcttcttcatattcagcccaatagatatgtcctctaacactgatttgctttttctcatagtcaatgccgtaatgctcggcaagcttgaacagccttatatccttactatccacttccatgtcctgaaaggtagtccacaggttatttactgcttcacgtgtcccagtgaccttataggtcgttgttgctaaatttgccatatcattgaattttaaaagattaccactccgtataataactctggtcgttgttctcgcattcctcagcccattcttcatcggtgaagtcactgtgcagacattcatcactgcaatagtaggctactcccatgtcagcacaatacccggcacgcatcagtctgccacactctgaacatcttctgcaagccctgtctgtgtcccaccagaagtcagtgaaagactcggctatgacatcctcactggtgttctcgtcccacttgtcaaggtagaactctgcaaacttgttcaactccggctctatgtagagcatcttttcagtaccgccaacagccttggtcagtcggctcaggattgattggattgtcgtcataatatcatctgttttttttcttccctctcgtagatcaactacttcgggaacacatataaattttgttgcaccaagaaggtgtcggggctgtctctgcaaggttttgctccaaaatactacccgcaggtgtggagattttgcggcaaagcgaagccctgaccttgctgatgacaagaccggacaattaccttcgcaacggaatttatgccagttccccgaagtcggtgtatgaggaacgaatctcggcaaagagaagtataagcataaaaaaagcgacccgaaggccgctctattggagagaagaaaggatttacttgcccttcttggagttcttctcctgagctgctggagtttcctccttttcaacagcttcatagaacctggtggctacaaatgccactctgttgcgcttgacaccgtcggcatcctgccactcctccggcttgaaatagccttcaaccgtgaggagtgctcctttgacaaggcggtcaaaggatgtagtattctcattcttgcgccatgtctcgacgtttatgaaagcggaagtgcgggttgtttcctcgcctgatttctcagtgcggctgattgccaaagggaaacgtgcaacgcttgcggttgagaactgatggatgcttgcatccttacctacaaaaccagaaactacgaaagaattttccattttcttcataacattgaaattttagaagtgaaacatttattttttacgttgccatcaaagttggcaaggatagcaatcaggcaagtaattaccgaattatttcaccgtcaggcaggaaaagttttccgaaaagctgcagctggaaaagtttttgaaaaaattcagggaataaggttctggtacttgcagtatgcggcttgcactaacttcgcaacaggaaaaagtaagtgtcacggcttcgtccaaaatgagatgtgaagggaatggcctgatattcttgtgtctggtcatggtaaagaatgctgttctcatagtcagactcgacaggtttcacagatccatggcaagcaatccggacatagtgaaagcgataactcccaaacttcaccatgaacccggcatagcatagcaagagaaatacgaaactccgcactctgcataaaaaggtctgaacacggaagctattcaagaggatggaagccagaggtgaagcacaacaaggctgatgccactcatgtgagtgatgaaaaggtgcaaaatcagcaaggagaaaaagaaaggcaatgcctatcagtcaaagagcggacttctgtcctactctggcttactgcaagtttaaagtttagatttacccatgtatatatacatgtattttaaactttggttacaaacctgaacaggtttataaaaagactgacgaacaattcattgcgaatagaaatatcatatgagaaagaaaatgggaactacattttctccttactgaagcaccgacagacaatgcacaaccatgtaaatattctcataaagtagttaacagcccggataaaagaatttgataatataaagtcggcaataaatcggttttattgccaactttatattatcctagcagaacaatggaatcattttacaaagagtaaacgtaaatggtaagacaatgttttatggtgtgatttcagattgttgatcgagaaatatttacctcttcatattaggaaacagtcaagcagataggtgtagtttcgttaataagagattctacttaatttcttagtcatttgcgggatacttttaatactatgcttttacaacacaagaaaaatacctcatatattacataatatgatgaattcataatggtgttacttaatatagaaaaacacactaaagaatgattaattgctcagaacttatatataaagtcggcaataaagttggtttgttgccgactttatattatatttgcactgcaatgagtattgacgagaaatatagtattaaacagagcatattgaattatgctcgtacttacggacggattgaagtgcctcaattagtatcagtattggggataaagaccaataccgcccgccagtatctctgtaccttaaccaaagagaacaagatagcccgtacaggaaatggtgaatacatgcttacagataaacaggtgttctcatttgctccaacagaaacactgagaaaactatatgtcggattgaaagagaaattgccattcaccgatttctgcatctacgatggcagcatcttcaccacactacaacatcacgtctctgtgaaccatgctatttatgtcgagaccaaccgggatgctgtagattctgttttttctctgttgaaggattcagacatgcccgtttataagcaaccgacagcaaagttcatgtacgactacgtaaacatgcatgaaccatgcatcattgtaaagatatttgtcactgaatctccagtaaataaggttgatgggatggttactcctaccatcgaaaagctactcgtagatatacagaaagacgaagactttgattatatgcagggcacggaaatcacttatatgtatcagaccgcctttgatttgtacacagtcaatactcccaaaatgctccgatatgcaaaacgtagaggagcatacgatagtacttattcattaatagaacaatcacaaaaatatgataaataaagaatgctttacagcaagatggattgaagaaaaatccaaggagctaaactatccggacaaaaatatcattgaaaaggtcatccatgccttttcattgctggacatgttggcggcttcaggttgcccatttcatttcaaaggtggaagcagtctgatgcttcttttaaaagaacaaagacacaggctgtctatagatattgatataatatgtcctccaggtactgaaatagaagagtatctgcaatcatacaaagactatggctttattgactataagccgatagaaagaattcagcgtggaacagacataccaaaatcgcattccaaattcttttatcaagtggctttccttgatggcatagaccgaaaagaaaccatcctgctggacgttctaaatgaagactgtcactacaacgaagtcgtgactttacctgtagaaagccgttttataaagacagaaggtgaactgaattatgtaaaagtaccatccattggagatattctcggagacaagcttacggcgtatgcacccaatacaacaggtattccatatatcaaaaatggtaaggatgccagcatggagatcatcaaacagctatatgatatagccagactgttcgagaagacagaggtccttgaaacaacgacaaaatcgtttgtacaaattgcagaagttgaactctcatacaggcatttgccaaacaatccaaaactcattttcgatgatatcagacagacttcgctgtgtctggcaacaaggggaagtgaaggaaacggacaatttgatgcactacaacgtggtatacaaaggatcaaatccttcatgttcaatggcggttatttcattgacgatgcgattagagacgcagcacgcgcagcctatatcgccacaatgatagagacgggcaacacaataatagaaaaatacgacggtaatcctgccaccataggctccctggatatagcacccacacttccttcgcgactgaataagctgaaaaggacttctcctgaagcctattactattgggcaaagaccagccatctattacaacagttgtaactataaacagaaatacaatttcagcaaggagaaaaagaccaatatagccctccatcaaccagaacagcattctgactgatggagggctttctacaagtttaaagtttagatttacccatgtatatatacatgtatcttaaactaaacttacttgactgattcagccatacaacaggataagccattgagtttacaagtttaatagaactcatatatgtatatatgaattgataaacttatttataaacttcatccctaagcagaaagtaagttctttattcctttgctaaaaaatcatgtagcataaatttctaccatatgcaggatcaacataacgtacatctttctgagaatctgaaaacctgtatatatgtgaatacctttttctccttgctgaaataattggcgactaaataaacacagatgagatattgagaaatattttcgatacatattatgcgaaataattgataattacctaattttgcaaaatatagatgcatattagagataaattcattcgcatctgtgttattaaatattaaactctaataaaatcacatctaaatcaggaaagtgatgaaaaaattgaaacttataagaaaatcagaaccgttcatatttccaaatggatagaaacgtaaaatttaatggctcaaatatgattcaattagctgtatcaaattgagcatcagactgtttatataactgtgtgggtaaatagctgaatgatgaagactcaaccagcaattacgcattcagattgctggtatataatgcaaaacactgataatcaattatataaatcattttcacaagtaagtggaagtaatggctcaaatacgagccaaatagccattaattatctgacaatcaaccatataacaaatgtgtattggtaagtaacttgtgaaaacaaaagaaagcaacatttatatagtacataataaactgatttacaactacttaaactcctatttccaacaataaaatcatggctcaaataccattccaatacaacccaactaactgacatacagattactaacatctttgcatcggaaagtaagtggtggttaccaacaattagcatctatcatcaacgattattaaggcgttcattttgagcgcctttctttttagccttataagcgatggttatcgtttatagggctttttcagctcatttttgtaccgtatttgttgctcgcttgttactctccgattttaggtcggaaaggtcgtggagaaagtttactatggttgactatgatttacgatagttgaacaaaatggagaaattacaagagaaataaacctctaaaagtaacgaatatggcaacaagtaaaatgaaaatcaagaaggtatgtgaatggtgtggcacaacattctatgcccaaaagttaacgacacgcttctgttctcatcggtgcaataatcttgcatataaagaagcggtgcggcagaagagaatacaagaaatagaaaccaaagtccaaacggtaatcagtgaacaacccatatcctatttcaaggataaagaatatctatcattcaaggaggttgcaactttattggggctgagcaaacaagccgtatataaaatggtatatgccacattatgagaacgtgccgtttgaggtgccggataattgggtgtggatgacattgggagaagtaggcacttggcaatcaggtggaactcctagtcgttcaaacaaaacatattatggtggaaatataccttggcttaaaaccggagatttaaatgatggtttgatttcggatatcccagaaagtataacagaggaagctgtcgcaaactcttctgctaaaattaatccagcagggagtgtgttaattgcgatgtatggtgcaacaattgggaaattaggaatacttacatttcctgctaccactaatcaagcatgttgcgcttgtatcgagtttaatgccattactcaattatatctcttctatttcttattgtcgcaaagaaatgggtttatcgcaaaaggtggcggcggagcgcaacccaatatatcaaaagaaataatcgtaaacacctttattcctttaccacccctttccgagcaacagcgcattgtaatggaaatagaaaaatggtttgccttgattgaccaagtagagcaaggcaaagccgatttgcaaaacacaatcaaacaaaccaaaagcaaaatcctcgacctcgccattcacggcaaactcgtaccgcaagacccgaatgacgagccagccatcaaactcttgaagcgcataaatcccgacttcacaccttgtgataacgggcatagtaggaagttgccgcaaggctggtactcggtaactgccaatgatgtctgttcaataataggaggagtttcatataataaagccgatattcaagatacaggtataagagtattacgaggcggcaatatacagaacgggaaagtcattgattgttttgatgatgtattcatatccctttcatatcaaaataatgataatcaagtacagcgtggggatattatcgttgtcgcttctactggaagccaaacattgattgggaaaactggttttgctgatagggatattcctaaaacacaaatcggagcttttcttcgaattgtgagaccaaaacagaaaaccttgtcaccgtatatacgtcttatattccaaactgatgcctacaaagattacattaggaatgtagcaaaaggttctaatattaataatgtgaagaatgctcatctgcaaaattttcaaatttgtttacctccattagaagagcaacaacgcatagttcaaaagatagaagaactgttctcatcccttgatgatattctaacagccttagaagtgtaattaattacacttctaaggatagataaaacttaccagtttactactttgtccacaattttttgctgttcactagctgttcgacggagatagatacgagtagtctcaatactttcatgccccataaggtcggcaagtagggcaagatcattgaatcggtcaaggaagttcttggcaaaacgatgacgaaatgaatgaggataaaccacttccttattcattccgtattttcccgcaaaatgtttcagttgttgggctatgccacgtgttgtaatacgttccccaaatcggttcaggaatatatagccggaaataagacttttttctttgagccattttgtggcttctgtacgcaaatttttcggaatatataaacgacgtatttttccacctttactgtaaagatcaagatggccaacttgtacatgctcagctttgatgtgaagcaattcactgacacgtgcgcctgtggcagccataaaccatacgataaaataccactcattataaccatcagcttttaagcgtgtttttagaaatttgtagtctgcatcgctgattacgttttccaaaaagttcttctgctgtactttgacgaactttaccttcagtttctcctgttttgtaaattccaaatacttgttgataccttgcaatcgtaggtttaccgtttgcggtttaaagttctccaccagataccctttatatgttaaaaggttctttttgtttacttctccataatgattgaggaaatactgtactgtccacacatacgatgtaacagtgttttttgccaaattagttttggcgagatagcttttgaattttgttaccatattatattgatttataatgaatacggcaacaatataatagaatatatcgggcattatacgcagttgcctgatggatggacgttttgtaggcttgaccaaattataggttatgaacagtctacagcttatattgtagaatcgacagcttatgatgactcttattcaaccccagttctgacagccggtaaatcatttattattggttacactaacgaggctactggtatatactcgaatcttccttgtataatctttgatgattttacaactgattcgaaactagttgatttcccttttaaggtaaagtcatctgcaatgaagattctaaaagtacataaggacattgaagttgattatgtggcaatgtttatgagcataaccaaattggtaggtgacacccataaacgatattggatttctgaatactcaaaattagagataccaataccatcgaaggcagaacaaaagcgaattattcatgcaatccatggaatctttacacaattagatttaataatggagagcctataaactctccattattaaatctaaagacataaaagccttggttatagcctttataatcctttgttgttctttgtaaggtggaataggaatttctattgctttgaatagtttcttgttcaagtggggaatagcagaaccaaccttactttctcgcaagactttcctatgcaagttgattgcttgtagtacatattcttcgttcatattttcgttgataagcaactgtttgaaagtactaccttgatagccgtcaatcgaagtcctaaatacctcaccagagttctcgccatctactaaaatcaaaagtgaatttgcagtaacatattttccagaagtcaaagttttggcatcacgctcaccacgcaaatatttgacatcaagatttattcgttctattcctttttgcttatcaccatcaaccaaagagcatagtacttgcataggtgcaacagtccatccattaggcaactgcgtataatgcccgttatcacaaggtgtaaagtcgggatttatacgtttcaacaattcgatagcaggttcatcgtttgggtcttgcggcacaagttttccgtgaatggcaagatcaagaatcttgctcttggtttgctttatgatggtttgcaaatttactttgctatgttctatttggtcgattaaagcaaacaatttctctatttccattacaatgcgctgttgctcactaagaggtggtaaaggaaaagccatttgttctaaactgtattttggtaatccttcacgaccactacccgtaatcttcatagatttagcgaagtatgaagataaaactagcgcatggaaatattcaggttcaactaaaacagaacgcataatacaaacgtgttgactaacattaccacaattaaaatcagcaggaactacagcgcatcttcccaatgaaccaccagtaatattcaacaacaagtcgttagcaagtacctccgtacctttcatcttctgatgaacttcttcggaaatatatttgatatcatcataaacaagcctgtcattatatacattttgcgagcggaaaaaagggatcccgttcgcagaatagttacttccccttggcgtgctaccggaacctatctttgagcatatttcttcaatcgttgtccacacccatgaattcggtatttcaaacggcacgttctcataatgtggcgtatcggaagtctttgcagacttcttactccgcttgattttgccttcctttatcagtcgttctttttcagccttgattcgttcgagcaaaactgatgcaggttcatcgttcgggtcttgcggtacaagttttccatgtatcgcaaggtcgagtatcttttgacgtaacgcttttgtatccatcgtcgtatttctgtttgtatttgtgcagttttggctgcataaatactatttattttcttccagtttctttaattcctcattttcttcaaactcttcaatccattccttcaccttggcttgcaataaagccttgttggggagatagagttgataagcagaagcatagatgttagcatctttaggcaaggtgagttccactagtgcatcgttcttctccttacacagtagaataccaattgtcggcttttcaaagtcttgtttgacatagcggtcgtaatagttgacatacatctgcatctgtccgaggtcttggtgagtaagtttgtctatcttcaaatctataagcacatagcattgtagcaaacgattgtaaaacaccaagtcaacaaagaaatgctgctcatcaaacgtgaaccttttctgccttgcttcaaataggaatcctttgccaagttctaataagaattgctgcatcttgttgataatggcattctccaatttagactctgagtaaactgcatcgggctttagaccaagaaactctaatgtgatgggattcttgatgatgtccgatggtttcccaatagtttgcccttctttagccaaccgcattacttcatctttgttacggctcaaagccaatctctcataaagacagcttcctacttgacggctaagttgtcttttagaccattgttgttgggtacattctatttcatagaaactgcgggcatccggattttccaccctcatcagtataagataatgagaccatgagagagcgaatgtcggttcagagatatgttcctctgccttcggataatcggctaaccactggttagccttttggctcgactttggacaaccactggttagccctttagaaaagacaatataaaactgccgtatattcttaagcgttgaatacgaccatccatctcccaacctatcagtcagacgtttggagagttctttcagcaccgcctttccgtattcggctcttgtttctcccttttgctcatattctactatatattgtccgatatggaacttagtaaagacctcagcaatattgatagctgttgccacacgttcccttgcctgcgtgacaaggtcaacaacctttaagaacaggtcgtttatatctttatcatttgtgctaatatcttttcgcatagctcaattttcttcaatatttgcaagcagtttttcaagttcagtcaccgctctactgatggtctggctcttatccttgatgtctgccatcagttctgccaatgaacggtcgtccacctcaccacctggttttatccaagtaatgtcaagacttgttttgtctctggcaataatttcatctacaggatatttacgccaacgaccttgcggattattttctgcatcgtaggtctctactcgattattgtagcaagaaacaaaatcatccaaatgatgccgttccagtttattggtggcaagcgtatgctttatgtctgtacggtaatcgtaaaaccatatttctttggttggttgtcctttgctgaaaaacaacacgttggcttttacgccttgcgcatagaaaatccctgtaggcaagcgcaagatagtatgcagattgaaatcctgcaataagcgtttgcgaatagtctcacctgcccctgcctcaaaaaggacattgtcaggaagcaccacagcagcacgtcctccttttttgagcataagcatcatgtgttggaggaagtttaactggttatttttggtctccacatagaaatccggacggttgatatccacagagcctgccggacgagttccaaaaggaggattggcaagtatcacatcaacaagagttgacggttctttttctaaagaatcctcacaaacaatcggactacggtctgtaccaataccatgcaaataaagattcatggaagcgagcgtcaccactaaaggcgtattatccacaccatgcaaagctttgtcacgcaagaaatcacgtttttctttacttgctgactgacctttcatataatcgtaagctgtaagtaagaatccacccgttccacaagccgggtcacaaaccgtttcacccatttgcggattgatacaatctaccattgcctgaataagtggacgaggagtaaaatactgtcctgcaccgcttttcttgtcttgcccgttcttttcaagaatgctttcgtagatagctcctttcacatcaccgtccataatgagccattgctcctcatcaatcatggtgatgacctttttcagataaacaggtttgtctatcttgttttgtgccttcgtataaatcgtacctatcagattgtccagctcactaagcaatttaagggtctcttcatattgttttaccaaatccagaccatcaaatgctatcaaatctgcccactgataaccagttggaatagccgactcttctccaaacatttctacattttcggcatccatcttcaagaataaaagataggtcagttgggtaatataatcagtgaatcctattccttgtccggcaagagtggttgccagattccatacttttttggtgagcgattgctcagttgaactatttgttgccattttttatgctgcttttcttaatactacaaatgtgtaaagggaatgaagtgcttcgtccactttctgcatattaccaaatgcccgaatcatttgtgccgcttgggttgcgtcatcctctcgaatatctctgaccgtacaagctccgttagaagcaatgtaatccacaatacgactgataacctctcgctgtttgtcagttatttcacgctgggtttgtcctaaccaaagattgaaaaactgtttagaggtagtaactacactatccaatcgttcgatttggcggaaagcaaagcgcacaagttgtatgatattggtcaatgcatcgctttcttctttggtagtggaacgccttaccgctttagcattgactatggcataagagttccaaagttgtttggaagtgaaatggttgtttgccattttgagtttgttttccaaatccttcaacatagaataggtgataggcgttccttcattattatatataatacgtagtgcttctatttcatcactgtgttctttgcagaactcctcgaaagcctctgtcgtactttttgcttcctcaatggaaaaccctttggagataagcgtatcttcacccggcatcaatgtattgacgaatccggctgcaagtataagaaggtatttccgagcatccgcatgattggcaagcggagcgactagccccttacgttcattgttaggctcatcagtgcttacaaacagtggaagaatgcctttctccagcacatcgtatattctagcagaaagttccttcatgtcatcatgagacaaacggacaaactctttccgttgcgaatcatccgccttgttgtatattcgggcaagtgttgccgcaagccgtttgagatactcgtcaggaatatagccatgactaatacgttctaacaactcctttagagtaatcgtttttgttgtaggaccatcatctataggtgccactgtttgcgcatgctccgtcacgcctaccgcatcaaccaaataaaaacaatccttgctgaatgcgttcggggtaacattgcgaagttggtcatcaccaatagtacgcactccacgccctttcatctgaatatacaaaggcaatgactccacatcacgcatgaacatcaccacttccagtggctttacatctgttccagtggcaaccaacgtacaggtcacagcaatacgaaaatccttgtcgttacggaattggcgtatcagttcgttactatcgcctgccgaataagtaattttctgaacaaagcggtcgtcagtccgtccgaacacctctttagctatctgtacgatatttgtagcgtgagcttcattgagagcaaatatcaaggttttgggcaaatagtccatattcggctcacgttgcgggtcattaaacaattctgtataaaccacatcccgataggtcgaaaggattaactttatctgtgccggattaataacactccgattaagttctttatttgtgtagtttttggtttccttactacttacagtcttgacctcacctgtatatcttgtttcttctttaaatttctcaccctctaatatagccccacccgtttccgtgacttgggtttttattctatatacccgacaatccacattcacaccatcaacgatactcttttctaatgtatagttgacaatgcgattgttattgaaaaaagccattgtttcgggaataggtgtcgcagtcaaacctaccaatcttgccgtatcgaaatactccaataccatgcgccagtttccataaatggagcgatggcactcatctataataatcatatcaaagtaatcgtgcggtaaattgggattgggaggcaaggttacttcctctgcaggttcgttctcatcatcgtcatcattatcctcaatagcttctcctttcaagaatgaaaacaaacgttgtattgtagaaataacgacgttactatcagaagggatagaagacgagcgaaggcgattgaccgtaaagatagtattgaaagcgtctccattctctgtcagtcggaaagttccaaattctccctctgcctgttttccaagattatttcggtcgacaagaaacaacaccctacgcattggtgtataagaaagcattcggtaagcagcaagacaagcagtatatgttttgcctgctccggtagcaagaaccatcaatgcccgattttgcccagcacgaaaactcttttcaagttctgtcaccgcttcatactggcaatcacgaagccccttccttttcaatgtgggaagtccggcaaatgtatcctcaatccccagtttcttgaccaattcatgtggcgtaggaatagttattatctgtttgaaacaagaatcttgttcacggaaatcacagaagtatagttcttttccatttgaggtaaagataaaaggcaatggcttttgatatgcctgatagatatttgggacacttcgtgcatatagagctgcttgctcgcatacttttgaagcaaaaacgtctgtttcttcacgcttagcttcaagtactcctactgcttttccattaatgaaaaggaaataatcggcttcaagatttcctttcaataaaccttctcttatggctacagccgtaccagtaggttcataatcctccctattaactactttccaaccagcatcggcaaaccactggtctatctttattctcctcaaatccgcaactaagcccttgaacgtccttattgcgtttacacgtcctctcattactgaatttgcagataatttgaacttgaagcacccacttctgcctacaatatccccttaccccacaatgtgacttgaggcaatacacaatatcattcccataagttgtaggcattatccaaaatcagtctggaaaacatctgcgtaagcattattacaggtatagatgttcagcacataccgccttgatgtcctgatccacttggctggtacagagataaacctgaagacaaacgcttttatgcgacttgttgcattgagcccgaacttctttacgtcaagtctttgaataatggccttgtaaaagttacggataagtgctgtaagaagaaggaacactgtgttctctgccatgaaggatttgggcaatctgtcccacccgaaaccattgttcatatcatcgaagatacgttcctttcctccacgaaggttatagaactcgacaatttctcttacggaagaatcatagtcgttagtcaggatacaacggtatgtgtattctccttcccaaaaatcctgcacaccatccatccgtttctgtctttgaatcacaagtcgatatgccttacctttccacttctcaacaaggatagagttcaattcaaactcaatgccattgatttcctcagttttccagcctttgagagcaaaggtgtcattgtagatcgaactgcagcggttagcacggatatagaaggacttgcagtgtttttctatttcctccacgatttcctcggaacatgatccacaatcagctctgaagcgattgatagtgagcccattctgttcaaatctcgcaaagaacctcttcagcgtgtccttctgatggaaacgaacatttgtgttaccatcgctattctctataccgactatcaaatcgccaataaccgccacgccagggcgataaccaaggaacttcttgtatgtaggctttgcatcatacttctctgtctctatgaactgatggtcgaaatcaacatcatacatctcaccctctttcagttggccagatgcaaatatacaattgagcaataaagtattgagagtgtcagccgtattgaaatcgtaggtcttgcccatatctgatgtgtatgaaatgttttcttgcgtcaactcctttatcgccctgaggatagtatcagagctacaagtgcgaagtgtcggatgaagcgagaggtggttcatcaaatgagtagtgacatcctcaatacatgaaccgctacagaagtagatactcatgagagaacggatgatttcgctgtactgataaccgaacgatctacaccttagaccgagggttgagtcgattacagatgataatgtggagtcaaattgctccatgattgaaaataatcccccaaaaggagtgagtctctcagatttaatttgtatcttcgccatgtctatcgtcggattctcttgttttttttgcaacactaagataagtgaaaattctgacatggcaaaatcctgagcaactttttgttgctcaggtacttaaaaagtttaatttataatagtgttgcggaattaaggattttgagaaagtaaatccaagaatttttgccatgctgccatgtgctttctcgtgactggacgtaaagacatatagtctgtatcttcaggaattagtatttgagaaatatcacagtcaggcctttcctcatgttttggaaatgcaaaagtttgcaacccacctctactttttaaacgaccaacaatatacattcttgttcgatgctggggaataccaaaataatggggagatataatatcttcttttacctcataaagcattgatagcttttcatgaattacacgatacgtatttcctttatcatgagatttcaagttaggaacattctcaagaaatacaaattcaggcttgtgaaattcgagaacttccattattttattaaacaagttgcccctttctttctcatcctgaaacccttgttgttttcctgcttgtgaaaatggttgacatggaaaaccaccacataaaatatcatgtgatggaatgtccttttcgatattaataagattaatatccccagcacacttcataccaaaattactctcatacaaagtgcgtaaatcttgctggagttcactagcaaatacacatttgcagcccaattgctctaaggccaaatggaatcctcctaatcctgcaaataaatctataaacttatatgttggcataattggatcgtttttaaatttggtgtcataattaatttttcagacatccaataggtacaacatagactccatctgttcgcttataggcaaaatcaccaacgcctgtcagcaccatacaaaaagcaggagttttcattcgagatgtatctatgatatttgagagtgccattaatgtttttgcaccatcctcaatcaatttctctccacccaattttatttcaatgagaccatacgaaccattacgcaaatgtactacagcatcacattccaaaccattcttatctctataatgatagacagaaccatctaaggcatcagcataaaccctaagatctcgaatacacattgtttcaaaaaataacccaaaagtatttaggtcgttaattaaatcattgggacctaaaccaagggctgccacgccaaccgaagggtcaacataataccttgtatcagatgtacgaaccgctgttttacttctcaagttaggattccatgccggcatatcctcaattacaaatattttccgcaaagcggtaaggtacgcatctatcgtttcatcgctgacatcctctggttcatttgttgatatgtcggcaaggattgtggcgatacttgcttgagagccttgatgcctggcatatgaacgcataattctttttgcccgttctgcatctcgttttacattgtctactcgtgatatatcgctatttgttatcgctttataatattctgttgcctgtaatagtgccgccttttctgttttcttttgcaaagttttaggccaccccccacggcaaacaacaaacgcaagcactggcaatgtaagtttattcaaggctcctattttatccggggcaaggaacagttccgacagacttatctcacctgtagaatcccctgattcccacaaactcataggacgcatggtgagccatccatatcttccagtacctgtgtggtgaatttccttagcttcgacaggtacagcagaacctgtaagcataaactgcccgtcttcatctcggtgatctacttcaaaccgaatagcatcccaaaattgaggaacttcctgccattcgtcaatcaaacgaggagtttccccttcgagcaaaaaactaatattggtttgagccatttgcctatattgctgttgcttagtagggtcatccatatagataacacttttggcctgttgttcagccgtggtcgttttaccacaagctttaggtccctctatcaatacagcacccatcgcctctaatttatcacgcagaagttgatccgctattcgattcttatattccatacaccgtatttttctgcaaagatagcttatttctttgtattccaaatcaatttcaaaaatatatttggaaatttgacgcaaaatcatttggaaatttggctttgtttcgattggaaatttggcgtataattattttatactattgcggtgatattatttacggcattttctttggaatattctctatctctgacctcataattaggtattaagcatttgccacagccgttttcgtttgggcttgcccgtgtgccacgaaatatctttcgggggagcctaataccccaaccgccttacggcgtcgggtaggctgccatacaatctgcaagcagaggcggtgggattatccgatatatgacggattatagaatggcagtcaaatggataaacagcctttcccggtcggaagattttagacctcaattcgcgaataggttttaaccgacaaaagggagctgaaaaaattgttaccaataattgtttctcgcgggttaagaacggatttgcttctccgacataatccgttcatttctcagcggtcgaattacgaccttttccttgtcgataatgctaccggcattcgagtgtaagaatcctgttttagagtacgatttcggtcatcaaagttcaaccgcatttcttttcagttgtttgcatgaaacggtttactttagttttcttgccctatatatagagaaatactaaactaaacagaattatatatacccgcgcgggaataaactacacctgcaaaaaaaacatcgggaaaccagaaaattcggcagttgctttagtcgaataatccgtttactaaattgaccgcatcgtcctttttctgattgatgattttggcgtagacttgcgtcattttcacatcagcatggccgagtaatttcgaagtggtgtagaggtctgctccgagcgtcagcatcattgtcgcgaacgtgtggcggctcgtgtgaaatgaaaaccgcttatctattccagccgctttcgcccaaggtttgagaagcgtgtttatcatcgttgggctcggcaaatcgaatacatgatcttccgatgtcttctctccacgttccggcatccacttcaaggcttcgggggaaagcggcagataaatcggctctttggtcttttgcatagatacagccaaacgatattgtcccctatcaacaaagacatctttccactttaaactgatgatatcgcttatccgcagtccgcagaagcaggagaacaaataagcctgttttacggcttcgtttttcatcggagcagcaatcaatgcccgcacctcttcaatggtcatatacgaccgcttgctctccggcagacggattttatccgaattgttgatcttcgtaaaaggattgacttttataatttccgctcgcacggctgcattcaaagctccgttcagaatgcggtaataggtgtgtagcgtaaaattagatacttgtttgcccttcggtcgatattcagtcaatagatagtcgatatactcttgacaaaacgccttgtcgatttgatccatcgttacccgttctccggcataatttttcaagatgcggatagtaacttggatttggtttccatctttctttcctcgcttcgcctgattctctttgtaggtttccatccagtccagaagaaaaaccttttcacgggtttcgatacccgcttcgccgttggtaagttgaatgattcgtttcgatttgatggcattggctgcggccatagtcgtttgattccgcacacgggcattgttatccgtttcggggataagatacatcttcagatactcatacgtccgtttgccgtcccgatagatatccaaatacagacttttgtttccattggccaactctttcatccgaagacggataggttctttgacttttgcgggcttctttactcgtggcatagttcctccttgctttactcgttattcctgccacaaaggtagaaagaataatccgaattaaggaacaaataagaaacaaaaatgtaccgaaaaagaaccaaacaacaataatcaagtaaaacaagagaagatgtagatacagcgtaattacttattatacagattgtttattttcacttgattagtttttgttttctccttcaatctatactatataaatctggtaaatttcaatgaatagaggctttttgtgtattgcttatgctatgctttgtcatagcgtggcttacacagctactattcataggtttaccagaacctccgtcttggagttgggtaaggccacgctttctcaaatacttctgccgaataatatttataggttaaatattatacttatggcaaaactccaattacttgcaatcactactcttgacggatacctcttcgacaggactgtttcttcccctttgtgggataatccgaacaaatatggcctcaccaaaatacgggaacgtgctacacagactctcgggccggatgtatctttcatctcattgacacaatggaaaaagaaaaatgaaggtatttatttcatagaagcggctccggatacaatttccgttataagcagcatgttcagatactggttggtggatgaaatcatcctttttgtcgcaccgtatatccaaggggacggcatacgtctgtttacagaaattcccggtccttcctcatgggaaatgaccgggaacaaatgtttcagatccggtatttgcaggctggcctacaaacggattgaataacctgcaattatcttcttatcctgactgacttggtttagacaggcatcttatatttctcccaatattttcttgccttgtccggtcctatccagttccgttggtcatcgattcccctgtccgagagttgtttcctgaccagcttctggatatcaatctcccctttggctatcttgatcagcagttcggaagcaatcgtattcagcattaagtccggattcagttcatccggtatctcttccatttcttttttcataagtcgcttctttattttttaggtttattatccttgaaagtcatctcaatcctgtaattgtcatccagctcgagtgatgcctcatacttctttcctttcttgctggtaaacttcagatatccggtacgtttccccgatagcagcaggagcatctgattatccgtcagttccctgccgttgaacgttctaaataacaggaacccacaattgggatcgctgcatttggcgaccttgttaaagacgataatcgtttctgctccgcatttggggcagttacaatgtggcaagtccggatggttaagtttcagggcaagcagttccgaggtgatttgttgggtataggaattgatgctctgagtaaatgtttccgtggaaactttgccggtttcgatttcatgcaaggcgcattcccaccctccggtcatgctcacgttggcgatcatcttctcttttacaatatcatatacttccagtcctttgggagtgggaatcagtgaccgtccgtttctttccacgtagtgtctggcaatgagcagttcgatgattccggcacgtgtagccggtgtacccaagccggaatcctccattgcctctttttccttttcatcgtccaatgttctgccacaaccttccatcgcagcaagcaggcttgcctcagtgaatatgggctgcggtttggttttcttgaccaatgtatcaataccgagcacgggcaatatttcgtcttcctgaaattcgggcagaagacttccttcttctttctcactgggttcgttatagatgcctctccaccccggaactttgatttggcttccttttatcccgaaaagaacgccgttacagtccgcttgtacggataccgtttctttcaggcatttgccggagaaagcctccaacatgcgtcccgcgatcatggaatagatattctgctcgtcaagggaaagcctctggggatagttctccgtaatgattaacgcatgatggtccgtcatcttgctatcgtccacacagtgccggtttaaaggctggttacagaggttttccgcatgccatgtgaaacggggatgttgcttaagcaggccgatgagggaagggacttgttcgaagatgtcttctgtgatatagctacatccggtacggggatacgaaatgtagcctccttcatataatttttgagcaatgttcagcgtctgttctgcggtcagtccgagtttggtattggcacttcgttgcagggcggtcaggtcataaagtagcggagcttcttctggaacctctttcttctccacttgcaccactttggctgtcgtctcttcatacacttttttacggtccacatcgagtttttccggtgtatcatatttcccggtacaggttaagacgagttctttccctgctttcgttgtccgtagctgtagcagataatagggtttggctataaaatccctgttgtccagatatcgacggcaaatcatgccaagtgccggtgtctgtactcttcccagagaatagttactcttgcctgcagccatgctcaaagacaggctggcattcataccgacgacccaatctgattctctcctggctttagcggcacggtacaggttgtcaaactccttacttgatttgaggctatcaaatccttcccgtatcgatttttctgtcatggaagatatccacaagcgtttggtttccttatgatatcccagatattcaagcacatatctcataattaactctccttcccgccctgcatcagtacaggatatcacttgatcagcctgacccaacagtttacggattacttccaattgtttcagagccgtcggatcagccttgtatccatcttcggttttaatctgacggacaaccagtttgaacgggtcgggaataataggcagcatctccttttccacatggacaatgccgtagtcttgaggcagggccaatgccaacagatggccgtaagttcatgtgacggcatatccgttcccactcaagtatccttcctgtttctccgttacgcccaggacccgggcaatgctgcgtgccaccgagggcttctcacaaatacaaattgttttcatgttactttcttttttaatatgaatgactatttaatttttacactcttgacctttgatttttctttccgtacccttttcttcggttctttgggaatggagagcttctctttcttttccgatacttgtatgctttccgtcagattcggcaggggtatttcctttgccggaaaacggctgattaaatccattgagattcctgacattcccgcattcagtttcacctgatctgccggttggaggtatttctccccgttctttccggttgccagttcgtacatgactgtttcacggccctggaggattccttcgtaattttggtaaggaaggtttgattcagacagtccgttctgctgaagcatcccacaaatctcatcgggtggcaatcctccgaacttccggtcaaaaggagaagaaagaatgtacttgtatgttgccagaagctgcttttcatggctcatatcgggacatccttcatattcctgcagttgtttgattttcttttcaatgctgttcagagctttgaaagtatgtctgtccttattctgaataggcatactacccattcggaccagttccatctggatacggttcaggctggacgtttcccatttattcaacagattactgcgattgctccggtaatcatcccggaggatagcgattggatttttggtacgaaagaataatccgatccgttttccccatgagggttcgtggaggttggacgcgctccagcggatcgtgttgaaacggtaagtatccatgaatctcctgaaatgattccggctggtaaacaggtttctgaaagtttgcaggaatgctttccttccggcagccctgcggctacgtggtatctctttttcgggaatgaatgtattatttatcagttccatatgcattataatttgggcttcgcctgctttttaacggaagcggtttttgtcttgacctttttcttttcattgccacaggacagtccgggcttgtcttgcggtttttcggctgtttgagcttctcctttcttagaaacaacaacaggcgggcttacccgatgatagttcttccggactccatccctgtttaacagtgtttgcgccaatgacctggcagcattttgtaattcatccatcttctgccggaaaggataatcccggtacaattccttttgccgggtaatctcacggatacctttctccacaaacaagaaatcctttttataggcaaacgattcgtctgccggtaaatgggcgtatcctctggctgctatgtcctgaagtgtcataatgttccggttacggatagagagttccaatgcgccggctgtgacaaaccggttgagattttctcccgtaggatgcatgtcgaaagtgacggacggcttgtaattcgccagaatttccatcccggcctgcggcatggtggtctgattcccgttggagagttccagcatccggcgggagacggtttctatccggtaaatattcaatgactccacatcctgcaaagagcttgagtagaaattgtccgctgtcgattgcaggtaatcccgaaactttatagtcccggaaagtccgtcattgaatacgcggacaccttgttccgtttcagctatggtgtagaactgtttggcttgctttcctgccgcaatcttctccatcgcatcttcgtgtgcaataaagcacttataagctggtgagtagtccagatcccggatattctctgccgtcagttccctttggcatgctctcaaataagccgctttccgtaaaggtacggagttgttttcagtgatgcctccgtaagaggcgatgaaactgagggctttctcactgtctttcgccggtagttcgctggtgaaaggaatatctttagcaggtattccctcaaaatgcagcaataagttatccggtatggttttctgatccatagcaatccgggcggtcagatccataaatacctgaaaagagtccttatccgtcggaacatacgacacgaccatgacagtcgagacttgattatccggctgtaacacaataaacaggctctttaaatccgctttagcggtgaatgtatcttttattttttccatccatgcaggcatgataatcagttttagatgcggggattatgtgacttgttctgacgggaagccgtctttctcttttccgaagccgccggtccggtcagttgcaacggaggacaggtcagtctgtatctcaggccaagtatcttgtccgcgagttgctgctgcctgttttgaatattgtagaatgccttttcactatatccctttttggattgcagttcggacatttcttgatccagcggtttaaaatttcctttgtgggtgaactccttatagctttcattagtattgaaatcagccggtaatccgtattcccgtataaagagcagggtgaatatctcggcattctccggcgttaccgaaagccggtaatcttccgtaaactgtttgaatgcatggtatgtcggctctatgggatagccgcctttcttcaacagctcggattgctctatcggatacaatggcattttcgccagctgcccgtagaaaggattggaccggaaaaggtccagatgcttctgcatgtaatgctccgtgctatggttcgggcaggaaatatagaattctctgattcgtcccagagcctgtacttccggagtgaagaaacggtcagccagatattgcaggtaacactgtttatagatggctccttcatccgtggcgggcaggtagacggctcctttgggagtctggagggaaatgatggggtctatctctttgttttgcaggctgtccgggataagcccgtaatcacgtttcaggatataggccgcctgatcccggatctgtgatttgaccttctcctgtccgcctttattttcagccggaatattctgcagcgcattgaactgggagttgaaagaattcttgtgtatgaacggaatccttctggttgtatagtctatcccatagattcctgcggtttcctgtaaggatagtaaccggagtatctgggcattggcaatactggggagcacgttataggaggaagcaaacttgtcataggcatcgaatgtcggttctatgcggtggctcctgtccagccgggcattccgcaggatagtcgcatccagatattgtgctttctccggcagaaaagagtttgtatataaggagaaggcattgggagatgcttggaatgcctttaccacttctgcgtccggacgggtcagcttgtacaggttgacaaactccggtttctcttcgtccgtaatgaagaaacggtcggccagatgttgcatataggcatggcagcatgtctttccaaagccggaatattcgaacagaagcactcctttggcggtttccacggcggtcagggtttccgacggatcgtcgtggagagtatcctgtgccagcgcgaaccgtttggcttccggctgtacaagcaggtggtcggcaagtccgctggctaccagcatgggcaggcttttttcttcatcgtgagaatgcaggtattccagtccgcgcaatgagacattgccctgcatgcttcctccgttccgggtgatgaatttttgtaccaagctgttatccttgtcaaagagccggatatccgggtagcttactcctgccggaaactggtagcggcacagataaagatccggcaagtggctttggacaagggacggcttgtacatttccctttgccgctggaggtattcggtgaatcgttgattcatcatcgatacttctttctccggcatcaggtgcatctccagttgtcggggttgcccttccaagtcctgggtaacaaagaaaatcataatgtttgaaatctcttgcttttgcatacgattgaaatttaaaatagttacatggtgatacttctactctttttcttttcctgtttgggcggttcatagccccgtaccgcatagtccgtctgtaggattctctttgccgtatccttgatggtccgttcaagtgcatttttcagcagtgtgccatcctgcttccccacataagacagcctgatccgttcatccagggagacaaagctgttttgatggttgaaccggctgtctttttccaaattcccgatttgcccggtcttgcagatccggtcgagtacgcctatgttataattcttctggctcttgcccagattcaacttttcggccagttggttataacattccaaagagggagccatgctgcattctaccgccggggtatagttggctatcatatttgaatccaggaaatgagccttttggggaaggtatatcttttttaagccatgttcaaacatgttcgaacactttgacgcctctttgatcagattgatattggaagtgctgaaataatatatttgcagtttatccgcatccctgtaaaccggcgagaagaaattatcgccaatatgctgcaggtatttctgcgcacactgtatccccctgccggtatcattgaacatcaggactccctggttcgtatttattgcagtaatcaccctgttgtagatatctttttccttttcttgatggaatgcgcggtaagcgttcagttgttttttcagcaggggattgtctttggccttttgaagcattctctggatgctatccacattatggatgccataaggagatgtattctcgtaaacgaaggcgatatcccgcaatgggaaatgagttgcacaagacagtcctccgttatgggtcatgtccttgatgaacctttcaatgttccccggttgtacagcaccctgatatggtattaaatagacttcttccttaggaatgtaggagcctttcaaggccagttctgcctgcccgaaaagaaatttgccgccatctgaattgatgccataacgattctctatggtctggaaatgttcaatctgcctgttgctgttcaaattgaaaccaatgtatgtactcatattattttatggtttagatgaatggttgattaagatagtctatgccgtttcgacgggtcgggaacttttttattcttcattttctgctccattttctgtttttcttccaggtctatagtccatggaaaacaggtcatgatcttgtccgggcagcaaagggagattcttttttgtttcatggactcatcatccagccggatatagacaaagtaatccagttccccttttccggtttcttcaatggctgttactgttcctttatagggaacaacgggagtttcctcttccggatcgttctctacaatccgcgctccgaggtacatctgacttttaggtatcatatcgctttattttaaacggttattgttatgtctgttcttattctcagtctttttaacggtattcttctcttccggcagcggacagagcagtccgtcctttatcacgtatgtcctgacgccgaagggcttggaggaaccctcaattctgccctgctcaaagtcggccttgcaaaaaaggagatgccttgtcgcctccttgttgttttccgggagatacagtgcgtatcccgaagccagtgccgtcttttgaacttcattcagttttcggcttccgacggtgaaggtaacggtggagtcattcaacatattctcaagggaacggtgccctctcacatcgaaatcccttttcaaaattccatcggcagccttccggatttccgtagacaaccgcttgaactttcccgtatcgaattcgccggcagatttaacctgcgtgactttttcaaattccttggcatacggcagcagttcattgaaataggtaaacggttgttcatgaatattcatataaccgttacgcatgacggtcagcagccggtaaatgtcatggttctcccggctgatggaaacctgcgtatccttattgaaatgccagtcggtggcgaattttataaaatccccggctgtcgcttccatcgaatggtagcataccggttttaaactgtcgatgaattctttgggcagttcgtcaagaccgatataggatgccggataaaaatcgaaggaataatccagttccatcggtttgcacggcttgtaagcggcatctatgagaggaaccaggttcttgtccatgaacgtactgtcgtagacggccagatggccggtatcgtagtgcgggtcgaagtaatggtccgtgatgtaccggatgcactccctgaatccgttcctgccgatctcgttaccggaaaagataaggtatccgaagtcattctccaccacttttaaggggaatgtgtaccgcggctggcaccggtacaatgtccttttttcctgttgctgtaatcgaaactccaagtatgcgggttcctgcatgagatacttcttcaatatgccgccgtccggttcattcttgtatttataggtatagaccgcatcacgcagggaaatgcgtttggcagggggaatgcagtgttcttgaaaatacggcagcagttccttgctgatatattcctcgaaaggggtatgggtatctaccggtggaacctgcctcatgttcgccaggtcaaaccggagcagttccgtatccggaatataggggcagcactccgcttccttgatattgtcaatcaggaatttgcggaacaggctgtccgcatctcctttctgaatgaatgtgagggcatttcggggctggtggggagagtactgatggtaacggtccataccgacaaaaatacttcccggcttgtcgggatcgaaaaaaggattttccatttggtttctcttgtccatatttctacaatttagggtgggtatttcttttctttttcacgtcctgctttttattcaaagccttttcgatgactgttttcactttgaacacctgtttgttcgcaggaggatccttagaaaatacgatccgggtgaaatccccgtttatccatgcataggcatgggacgggttgctttttgcctctcccggcaggaagagtccgtgccctgccgccaatacttgccggtgaggggtaaagagccggacaccgtctacggtgacacattccatcgggtcgcggaggatgttcccaacagtccggtgtccacgcacatcgtaatactgcttgaggagtttgtccagcaaggctttatcctggccggtttcttctatctgctgccggatatccgatgctgtaccttgtttggaaagctccagtaatttacggtccttgctttctatttcctccaaaatatcagcgatattacggttgcgatggctgctggtacaatgcatattgtggcagaaactaccgaaatcctcccaggtcggcttcatctcattccggtagaccagctccatttccggtgtcttatccatctgcaggtaagcatattccgggtacaggccttcacccggattgacataggatccatcctttaggactccttctgcccggtaaacatttaccggaccaagattgaaatggggatcgaagtaatggtctgccataaattgcagaaagtcctgcctgtttttctgtccttccgtcgtatcagtaaagaacacaaagccatgggctgtctctatggctgtataggattgttcaggttgcttcatatcattacattttgagggaattgttccttttcgttttcgatacctttttcaaagccggtacatatggaatgattttgccgtttttctcctgatacacggtcttgtttacgggagatttggtatatgccattacccggttgcatgtcttttcggcatggaggaaatgtaaatctggcattgacttggatatttggggacagtagatccactttccttccagcaaggcttgcctcatggcttcgccggcatcggttccattgatgagaaacgggacgctcctgtcattcagtgtcctttccaatgtacggtgtccacggacatcgaaatccgtcagaaggatattcttcgctttccaacgcatgtcatccagcacatctgacaaatctggccccgaggactgtccgttgatacagtcgtctatccgggtgacatactcctgaaagacattccggtatccgaaatcgggatcatttattatatcccgcttgaatccgttctccatcagatacaacagtttgctgatatccgcattgttacggctcgcaggacatccggcaaattcattcaggcggagaaattcagaagcgctcggctccatgtccgtttcaaacgccagtttccactgtttcctgtcacggaaagcctcttttgagaatacagcattatcaaaatcatattccccttttccgctttggggattcttccggtagcaggcatccaccaaaggacagatatcgtcggacaggcagttgacgttgtattgcctgacaggaccgggttcgccatgaacccagaaataattgccggataactgttggtaaaagctcttcaatccctcccgtcccattttggtatcactgaaaaacaagattcctttggacgtttccacagcatgcagcggtaatttgtaaaccggattataatcatacctggcagccagctcatcctgcttctgatgaaaatggaccagctcgtccaactgctgtgtggtcagtttcggaagttctcccgatatcatgaggatatcgctgcgtgactgcgcaaacaggacatttctcagattggtacttattagaggagccagtcccttttcccggatatagggtagtaatacctgattgatatattcctttttggaaatatctccggagatagccggtacatccgtcatcttcgggaatgaatagatttccagacgggtattcggtacgaaggcggagtatttggcttttatcgattgttggctgaacaaggccataaacgtatagacagggtcttgcctgtcgggattggcaggataaagcatataggaggattctgcatggggtttctccttgccggtttcataaccgacaaggagctggccttcaccgtctttcctgaaaagctcgtccaatagtttgggatcatcagaaatataggttgccatttttcttacattttaggtgtgatggacggtttacgggtacgcggtttcttttccgcttgctgtgaggcttcctcttttttccggggttttccggctacttgtaccggtgcatggggctgctgctggcttccgtcttgttcctgaccttgtttctgtgcctcttccaacttcttggtgcttctttcccagaggaattccacccctcgctcggcggcactcatctggatggaggtggcataaaattttccattatcagacttgaaacggatcggtacttcctcaccgcgcacggcagcatcgtattctttcggagaaagcgtataatctttcaccttacgtggaatgcgtgcctgctctacgggcatatggaacaattcattggtcaccgggtctttggaaaggtagcaggatttggtttctttggtacggtagtcaatgactacatccaccgccttgccgagattgccggtctggttcagggccttgaggtcttcttccgtcaggacatgtcccctgtagtcttccccgatcttgggagcctgacggatgtagtggatgtcgaacttgacagctccgttctcgtcgcggaacagggagagtttggcatccccgttttcacgccccagctcggaattttttgccacacggaaagcgatagcggaagtctttccctgcaacattctttcgaggctgtcctttgcgttcttcagtccgtccggggtaatgccgtatttggcggcctgttcccaattcacttcccgctcgttgaagcgatggttattatacaccctggtcgaagccagttcccttctgactgcttcgttctgtggttcctgcgccgcttcgatcttttctttggcctgctctacgagcgtttccttcggcatgttgtagagggagtaacgaccgggattattgtactggtagagaaaattcttcccgaagttggtgaagaagtttccacgttggtccactttgataaactggtccctgttcgcctcgttagcttcgagcgtttccagctctccgttcgctgcgattccttttacacctttggctttctgctctttcttgtcatacgccatcaaatacccgtgttccggggttgcttccttgttttcaggagctaaattcacatcgttcatatacgttaattttaaagattaatgaatcatttacgagggtaaaattactatctttgtcattaaatagtttgattatgaggaagttgtcattaattgtcatgttctgtcacttattgtcatgtccggcttttgcacagtccccgtcaaagggatataaagccggactcagtgctgtcatctaccgtatccactctgcccggcagtgaaagtctttcatatgagacagccggttgccggttaccgtactggccgattatcctattctgtatccattgaatgaaagtcggaggaggtatgccgtttcttccggtttcggtataaggatgcatccggtgaaaaagaaaaggatactccatgccggagtggatcttgccgcaccctatggcacgccggtctatgcttcaggaagcgggaaagtcgttgaagccaggtatagcagcagttacggctggtacatcgaaatccggcacgcgggcggcttttccacgttgtatgcacacttgagcaaattgcatgtgaggaaagggagcgatgtacgcataggtcggcatatcggcaatgtcggtcataccggcatagcgaccggcaaccatctgcattttgaactgaaaaaaaacgggaagccgcagaatccgttgcagtgggtgatactaaaggattcccgttctaaaaagagtcattaatttaatccgttacacaatgaacattgaagaagccaagagcattcagttggaggattatctccggcgtatggggttcaacccggtaaaacaacaaggggacagtatctggtattgttcccctttccgtgaggagaagacaccttctttcaaggtgagcgcatcccgcaacctatgatacgatttcgatgcgcccatataggctacacaataaatatctctatggcaagagattaggttagagttcaacagacctatcctcaacgacttagctggaggagaaatccaaaggtgacaaaagcatgtcggtaaagtcattagtcagctaaataccaagctgcgactgcatggcgagaggaaaagacagacacaaggatgaagcctgattggttgaacgatagttctgctgcacacgtaccagccccgacgaaaggtatttgattcacgtcgggctgaagcaccccatgtaaaccgaaattacaatggagcaggagctggcttcagagcaaccacaataagtggaataggaacgtaagtcgcatccgacagtctgccgagccaaacagttattgtgaaagcaaatggggattccctaaatcagaatgccgtaaggctatgggcataggaccctgaatatctgacatgggaacggagcttccgtagtagtccgagcaagggaaagccttgtacatggcgaagggaagcagttagataacttaatacaaataatggaaaatgtgtgagacattatgagaagtcctgagcaagtattaaaagctttaaacaagcatggtaaagtttcggattacaagttcgaaaggctgtaccgtatcttattcaatgaggagatgtttcatgttgcttaccagcgtatttacgccaaaccaggcaatatgacacccggtacggatgggaaaaccatcaatcggatgagtcttcaaagaataaacaaagtcattgcatctttgagagatgagtcttacaagcctaatccggcaaaaaggatatacatacccaagaaaaacggtaagaaaagaccgcttggaattccttcctttgaggacaaacttgtacaggaggtggtgcgcatgattcttgaagccgtctatgaagaggtgtttgcaaacacctcacatggattcagaccaaacagaagctgccataccgcattgacccatatccaaaagacatttacaggtacaaaatggtttgtggaaggagacattaaaggattcttcgacaacatagaccacaatgtattgattgcaactttgcggaaacggattgccgatgatagatttctaaggcttatccgcaagttgttgaatgcgggatatattgaagactggaagtttcataatacaaacaagggaactccacaaggcggtaatatcagtcctatactggcaaacatttatcttgataattttgacaagtatatggaagaatacgccctacgcttcaataagggaaaagaaagacacatcaccaaagaatacaagcaacttagcgataagatgcaacgcatccttaaaagcatcaagaacatacaggatgcagatgtcagattacagcttagggatgagtatgagaaactgagacgtgaaaggcaaaagattgagagcagagacagtatggatgaaacatacagaaggcttcgatacgtaagatacgcagatgatttcctcattggtgttatcggaagcaaggcagagtgcgttaaaatcaagtcggacattaccaagtatatggaagaaaacctcaagctggaactgtcacaggaaaagacattgataacaaacgcacaaaagcccgcgaaatttcttggcttcgatgtttcagtccgtaagtctgatgctatcaagcgggacaagaacaatgtgccagcccgttattacaacggtaagatagtcctaaaggtcgccatagaaacggtgcggaacaaactggaagaatacagcgccatcagatacaaggtagaaaatggccgacaagtttggtttgcaaagttcagaggcaatcttatgaagaagaaaatcgaggacatagtggcggcatataactctgaaatcagagggttctacaactactactgcattgccaacaacgtggcatacgcgctctcaaagtttggatacatcatggagtacagtatgtaccataccattgcaggaaaaaccaatagcactgtaagcaaagtcattgacaaatataaggttgggaatgacattatagtgccatatcaggatgcaaaaggtaaattacggtacaggaaattctataatgagggattcaaacgtaaaccaccaatgtactatacggaggtaaacgacttatcctacacaatcgcaattccacagccgacacttactgagcgattggatgcgagaacatgtgaattatgtggaaaagtcggacctgtagtcatgcgtcatgtcagaaagctaaatcagcttaaaggaaaaactgaatgcgacaggctgatgcttgaaaagcataggaagacattggttgtctgtgaaaagtgttatgccaaaatacacagccatgctaaataaagtcatgttatcaacggagagccgtatgcgtggagacatgcaagtacggtttgggggcaggtacgggaaaacctactgccgaaaggcagtaaggcgttctgtaccgagcctacgcatcggacagggaggggacatcatcaccctggcgatggagcttcaaaagacgaaggatatctcttatgcgcttaaaacgatagagggacattttccggctgctttccgtccggtagcagcctctccccggcaggcggaaccgcaggctaccggctaccggcaggtacgcattgatccgctgacgaacccggtcttgctgggatatctcaaagaaagaggcatcttgcctgaaatcgcaagggaagcatgcaaggaagtgcattttcagaacaagggaaaatggtattttgccgtaggctttgccaaccggagcggcgggtacgagatccgtaacaaatacctaaaaggcagcatatcgcccaaagagattacccatatcaaaaatggcagcgaccgttgcatagtggttgaaggctttatggattatctctcatacctcacgctcaaggctacgcatcccggtaacggacagcctaaaggaaacggtccggactatatcgttttaaattcggtcagcaatgtaggcaaggctatccctgtcttgaaagagtataagagtgccctctgcctactggataacgattccgccggaaggcaggcttttcagcagatggcgcaagccggatgcccggtcagggacaagtccgactgctaccgggagtataacgatttgaacgattacctgttgggcaggaagatggcgcaggagaacaagacggatcatcagcacgaaacagccccgaagctgattgaaaagcctgcaaagaaacagtccggttgaaaattataaaatactggtccttgtctgatgcatgaaaggcaggcaataaaaaagagagtcaaatccctgctggagggaatttggctctctttttattgctacccggctaccaccggatatttattcttaataatttctgatcagcaattcattgaccgcttctcttttctcggctatggaacagatggaacggaagatgctgattcgctggatatggaaaccggcatagaggtcgtcgaagaaggtgttctcagggttcttttgccggggatcggagttggaaagcattcatttggcaccggtttcacctattcccttgcagaaatttgccaggttgatctgctcttcatctccgaagtcctgtggcatgtaggaggtgcaggagttaccctcattgaccggcttataaggcgggtcaaaataaaatagggagttggctccggtgtattctgcggtctgccggtagtcaccgtccagaatcacaacatcttgcagcagcttgtggttaaagcggatcagttcctcttccaacagttttacccgtcccccggcaccaaaagtgacggacagctttccgctatggttcacggagtagatgccgttataacaggtacgcatgaagaagataaacagggcggcacgggtgatgttattcgggtttccttcattgtagtaggtacgtttctccatgaagtagacccttcttcgggtatgttcctccagcgcgatgtattcgtcctgtatccgggcaagcactttaataagctgctccggggattccttgatgacgcggtagacattgatcagagcctcgttggagtcgttgatgacgcaacggatttccggataggcttgtcttattcagaagaagagggcgccgccaccgacaaacggttctacataggtatccatctgtccgaagtctttcggaagggattcgataagtacgggaagcagtcttcttttacctcccacccaggggaagcagggttttcccggcaggttggccggagaacttttctttttttccatgtttacaacatttaaatgattaataaattaaatagggattattcatcgtctgccgtttccagcaggtgtttcaagttgggatcattttggatgcgaagcagctctttttcgatgatttgcgtcacgtcttccttgatttgatagtagttcctttcgatttcctcttgcatgtggtccttaccatccgcaccggtaaagtcggttatgacggggataggcttgtaggcttttgtttcggcggctacccgttcattgtccaccacgatctcgcaatggaatatcttctgttctatcttctccccgaagttgtcgcagacactgccgacaaactctccttgcgagaggttggagattttggaggcaggtatcagcgagtcgagctgggtactgatattggttgaggtgtcttcacgggtcatattaatggatttgcgctgttggagcactttcccaaacctttcagaaaggtttttcgctgtttctccgaccacttgcccggaaaagatatttccaattgtgttctggatcacccgcgcctccttatcaccgtagtcacgtattaactggctgaaatcctgtgctcccagacatactgccactttgttgctacgggcggtagcgatcagggtgtcaagtcctttaaagtaaagtgtgggaacctcatccactagaatagagcatttgagcctgccttttcggttgaccattttaacgatacgggcattatacaatcctaacgcacatgagtaaatattctgtctgtcagggttattgccgacgcacaaaactttgggttcctccggattattgatatccagcgtgaagtcatctccggtcataatccaatataaggcaggtgagatcagccttgatagcggaattttggcggaagctatctgcccttggagctgctccatcgcaccacctttccatgcatccataaaaggtgacaggtaattctccagctcccggtaagaggtcagtatggtgaacaggtcggaatacggtttattcaatagctctatggcatgtgggaaggtgcagaatttcccgttttcatagattttaagataccagatcaccgccgcaaatagcacaatcgggctttctacaaagaaatctccctgcttttgaatccaactcttgttcaaatttaacatgattacatacgctgattcgtatgcatccgcgatatcggatagaaacgaaggattgaggggattgcaccggtggctgtatctgggatcatcgaaattaatcacataaaatccgaccggcttggcatacttatccttgtttttaagcagctggttataagcaattatgcttaaatccggatacttaaaatcatagatataggcggcgaatcctttctctatctgctggcggatatagttattgatgatggcataactctttcctgatcccggcgtgcctaatatcaatgaggcgcggaagggattaatcacgtttatccagcctgaataggtctttcgttggtaacggaaacgggtgggcaggtttaccgagtattcattggcaatcaacctgcgctcctgcatgaagctctcgttctcgtcgttaaagacgtcatccatgagttggttcttcaacaggcggctgatccaggttccggcggtaagcaggctgatatatccggcagctacggtagctacatataataaggttagaagcgcgacggggaagcgtgccgtcagtaagagctcgctaccaaaaaagagcagcatcccggctataaggtaacagccgatactccttcatgacatctccacgtccttccgtcctttcgctcccatgcaggagaagaaaaggaagagcagactgaaggacttgctcaccagcgaatgggaaaacagcccggtatcccgctggaaattgagcagtatcttgtccacgacaccgatgttcaggttcatggaaagaaaatagggatagcagaaataatagacattcatcactaaaaataggatgctgatggccctcatgaagtcaaggttcttattgagccctctggtttcgtcttgtgacataagcggtatgataattaatggtgatacattttattagcccagatgcggacctctgcgttttctctttttctttttcccgtaagggctttgcgtcaggtcgtctgccggatacggataggattccaaagagaatatatcaagcagtccttccaccagctccgtctctttcatttccggttcggacggatggataacaggggcttcttcagtcttttccggtgggatcgtgccgtacttccggtttataaccgatgccgaatattctttgcccagaagcgagcccttgaatacggtctttgagttatggtcgatgtaggtcacgccatagatcacaccggaatcgttctgccagagtatggcggcaatgccttttccagaaagttcctgcaggaatccctgacgggtgggctgtccttgcagggcggtagcgatagcttccttcgtctgtacgggtacgggatgtcgggcaattcattgtttgcttttcacaaatttcttttggagtgcctcgtagcctacgcttttaccgatcttgctggatttgatggctacgccggtccgttctcctttttcatcggtagccgcatagaccagtccatgataggtctttccctttatcgtcttgtgggcctcttccaccgttacatggaaaaggccaagcagggctttaaactccttgacggattggaacttgtatccctgcatgacgggcttgaccacattggctatctgatgcttgatatcccccttccggtaatcgacggcagtcagcggcagggattcccgtcgctccatcttctcggcgggtaacagatggtatttcctctccagctcccggcaaacagcggtcgagcgttgccattctttgtaatctttaattttctttccctgctcgtcaatacgcagggagacgatatggatgtggggcctgccgatatcctcatgccggtagatgatatagggttggttgccatatcccattttttccatgtattcctggccgatagcggtcaactgttcatcggtcagcacatcgtccgggtgtggatttaatgaaatgtggataacgggcttctcagtccggcggttagccgccagatacggttcgaaggaacggatgcagtgctggatggtcggatggccgtctgccggttccatgatccggtttcatgccagtggccgtgcctgctgcttgtccactttttcttgattgtagtataatgccccgtaaacggaggctcctgatgttatttttgcaaccattgttcaaattcttgggtgagacggataatctcccggttgagagatattagttcaatagtcagttgctccaatttatagagcatggcaagagccttcttttcggatagtccggtatgcagagctttgactgcctggttatagtttactccgatccggcggtattcgctctgcaggttggtcagcttgatgtagtagtccgttgccgccttatctattttcacgactttcatcggtttgtcgaaaagggcggcaaggatgaactgggatttattattagctcccgaattctcaaagagcctctcaaactcgatgttctggagttcgtccagacggaatccgtaataataagaatgaagttctgattcctctttgggattccgtccgcctcttcatttgctcgaagtgtcagcccgtccgggtttgcgtgtactattgattttagccatatcttttcaggttttatttatccggcagcaaaataagtgataattttgatacgaacctaaaatcggaaagtgactacaaatgacaagagatgactatttgtgacagggggtaaaaatacccctgttcacttcccgtttccgcaagccgcgatgttcttttcaaaggtttcctttagtttgggcagcaggacggaatagttctttttgcgccgggcaaggtcggcacgcaggtcatatggtttgggaatggcaacattgaagagtttctcaaaagcggaaacgataccggcgaaagagaggcgtttgccgctttcgtccgtaatcagcccgctgtaatccagcgaggagatcagttccatcaggttgaccagcgaacctttccaatggagcgatgaaagaaacgaggaaggtgtcgtgatggttccggggtactgtacaccaaaattgaccagctctatttccgcctccaccagcaggaggcatttgtccagatagaattcggctactgccgtgtggaaatgtcctgttcgggtgaataacttctttagggaaatcagttctaccttgctgtgaagcagatggcgcagcctttccgatacggaaaccgattcgatggcgaggtcgtaaaggtattgttcatattcggtataggaggaagagaattcttcatcggaaactgtctgttttgggcttgaagccagagataaataattgaatatacggcattctgtaaatggtttcatacggcatacatttgatttgtttataccggagtaagccaaatgaaatgcctctgctatcgtttaaagctctatacctttttaaaatactgacaatcaacaataaacaaatttcatatagaaacgggtgtaaataaaaagtgtaagccgtccttgacaagaatgttaggacggcttacacttttgtaaacctcatttgcttcgggttatcctccggtcagtcgatgatatggtatttccttagtttctcatacagggtagtccggctgacattgagcaaccgggccgccttggaacggttgtcacccgtcttttcaagggtctggagaagcaacgccttttctttttcttcttccgtccactgcgtttcttcttctttaggaagggagatttcaaggttcaggtctgaaacggaaatccattgctcttggcagatgagtacggctcgacctattacattcttcagttcacggatattccccggccagggatattccagcagtgccgcctctgccagccggtcaaagccacgaaacgatttatgggccttggcgcaagtgagtttcaagaaaaaataagccagaggaaggatgtcttcccggcattctgccagtgtaggaatccgcagagtgaactcattgagccggtggaacaggtcttcccggaagcgtccttctccgatggctttttccagattctcattggtggcggcaaccagccggatatcaaaagagtattctttcgtggaacctaccggcttgcagcgtttctcttgcaaggccctgagcaggagcatctgtgtcttataggaaaggttgcctatctcgtccagaaacaatgtccctccgttaacggcacggaacaatccgaccttgtcgctttccgcaccggtaaaggctcccttctgatgaccgaaaaactcggaggcggcaagctcatcggaaatggccccgcagtcgatagccagatacggcttgttcttccgatggctccgggcatgtatctcggctgcaatgtgctccttcccggtgccggaagccccacggagcagaacggagatgtcggcacaggcaatcatctctatcagacggtacatctcatgggctttggggctttcacctcggtagaactcctgttcgttatcgtttttatccagtatctccgttatcagagccaggagattgtctggctgcacaggcttacacaggtagttgatggctcccagttgcatggttgtcaccgcattctccacctgtccgtagttggtcatgatcagaaaagggatagagtagtacttctcattcatccatttcaggagcgaggtgctatttccgtccggcaggcgcaggtctgccagtattaggtcgaactccttttgcccgatggctttacgggcattcgcaagggttgccacgcattcggttttcatcccttttttcaccagccagttgctgatgctacggctgaacacaatatcatcttcaataatcaggattgttttcataggctttcctcccgtatttttcagcgtatactatcagtttttccactgcccggatgatgtcccgcatttccatggattgtctattggtccactctgtcgcaggttctgtcaccagttcccgtaaatgagacaaggggaaatccagacggacggtttcccataggggcaggttcttatgcaggatggaggcggcggcctccttgtcttgtcggtctaaggcagcggttaatgcggcaaggtctttccggctctcttcgataaacagggcgagcatttcctccctgttgtcctctcctgaaaggatgagtgagaaatcgggagcatactcctttctgtctttttctcctatcacttgtgccactgtatttatcagttcttccatagagaatggtttatggatgcagcccgaaaagccgcccgacagatactcgttgtcatcatccacccgtgccgttaccgctatgacggggattgtctttgcgttctccatattggatgcccggagcagttcaagtattccgtagccgtccgtttcaggcatctgtatatccgtcagcagcaggtcatatctttgtgaccgtagccgggtaaccagttcacggctggtctggcagcagtcgcaccgcactccgttacggttaaacatctctttggtaatgttcagttgcatccggtcgtcatcaatgaccagtacgttgattccatccagatgataatcagtagcgatgcgtgtctcatccatctgggtggattcatccgcctcaaggagtggcaggaatgcggtaaacgtgctgccttcacccggtttgctttttacggtaaggcttccctgcatcccggagaccagcctgcttgcaatggccagccccaatccgaaaccgggaacattacgggcattgtccaaccgttcaaaagctgtgaatatccgggttgtttcttcctccgtcatcccggtaccggtgtcctgtaccgagaaatgcaattctttattccggtattccgcttgcaggcggatttcaccttgccgggtgaatttaatggcgttggaaagcagattgttcaggatttgctggagctgggaacggtcaccgcttactaccacatccagaccggaaaaggcggttgtcagccgcagctttttctttttggccagcgaaccgtagttccgggctgtttcgctgaaaagggtctccagccggaaaatcgaaaggatgggtttgttcctgccggtatccagcaggtagaatccgatcagcgtattgaccagcccgatcatgtaatcggaagaatggagtatattttccgcatactcgtccttgcggctcttcttttcttccccggggagcagttcggcgcatcctttgatagtagccagtggcgcacgaaggtcatgagcgatggtgagcatcatgcgttttctggattgtaggagctccgtgttctcacgattggaggcttccagctgacgctgatactggtttatcctgttcagatcccggtggatgataagatacaggaggacggtcagcaacgagatgaggacagccagcagagagaccgtatggaacgagcggtcgcgtgtggaaatgaattgcctgtaacgctcatcaagccgtattccagcatccgcctcaaagtccctgacaatccggtgtagcctgtggttcaggtccgtgttgttactgtacaggaggtccatctgttccagcagcctttcccgttcggctttctgcatgtcggtcacctccctgtcaagggagtgcagcatgctcgtgacagatgtggtaccctgatgtttaccaatggactgtcgctggcgttccagctgttccttctgctgcagataggccgattttttcctcccgggcctgatgaatgaccagaaacccttcttcggagtttcctcctccttctttttctcggcaggaaggacatccgcctgctggatatgggacacgattgccggaatcttgctgttcacgatctcgccggtcttgcgcagacgcccgaacgtgtccatgaccgtgtctaacaacagttcctttctttccagcagcaggcataacgaatctatgcgcgactgttgttcgggagacttcacataccttttcagtgtctgcaacatgttacagacactgtctttttttgtgtggtagagtccaaggtcgctttcatcccagacgctgactgtttcaccgtaagtggccagtcccagcaagcccgcgtatgtttctccggccagatgccggatacaggccagttcatgctcatcctgtcgcaggctgttccgcctcgtctgttccttgcggaagatatgaatggtcaggacgagcaggagaagcagtatgacatatcctaaaaggattttaagtttcaaccacatggaagtcttcattcttatattggaatcctacaaaaaggcgtgttcgctcatataaaagggaataatagaaacttatgataaaagtttattactgtttcaaaccatttgaggatacctcgcaagtttgctatcacacagttgatcttttaatctttttttatactcacagaaaggataggaacctgctttttatgactgaaacatatcacatcccctttattggacattacattctcattcgatcatattgttttcatttcggctcatccgtttcttcacccgttctactgcttccgatacaatttctttgttttcaaagcgttgtgtataattggtatagtctggatgaatccgtttgtaggtcgggtcaagaaacaaaggactggaaataatatggtccgctgtcgaacggttacaacagaaaactatattttcaactcccgccagccgggtcagtgcctttacatccgtgtcatgtggctgcaatgtcatcggatccgtgaaaaagaacaaataatcaatctctccttccacaatacgtgagcccatttgctggtcaccacctaaaggaccggatttcagaatcgtgatatcccattctgtttcaggatgtttctcttcgagcgcttttttaatgagtgtaccggtggttcccgtacaatagaacttatgccctatcagacgttccgagttccaaagaacccattctatcatgtcctttttcattgcatcgtgtgcaaccagaccgattttacgaacaattgttttcatcataataataaaatatggtttatgtgataatataattaacaatatccaacagctttataaaaaacaggagaatgactgtatgagtttgagcagctccttgttcgcccggctgtccacggtggcttcccgcctctcctcaaacaaagtaagcgttgcggagcattccccgcagatatcaatgccgactacacgttcctttcgaaggacaattgccagtaattcctccagttcctgcaggctgaaagacccttgatcccagtctgttactgcggatgccgggttcaggacatccttgtctatggacaagtaaaccggtccttcaatatacgcagaggagaaattgcgccagcccttctcgtgagctaacgtcgcttcgctataaaaactgactcgttgtccgtattcttccggtacggtgcgtatcagtttgtccgatgcaccgactatcaccactttcttgcaaagcatattccagtctaacatgtcttttacccagctcccacaagaaagcatgcccttgaacaagggaggctgcatgtcggggtgatggtcgaatacaatcagagagaacggaactcgaagtttgtctgtccataatttggtcaggtaatgataattgcccgaatcaatgaaatggataccttccgctggataaccggcaatcacccgcttcaattttcgtatcccctccttgtcacagtaacctctcgttccagaaaggtgacggcagtctagccaaatgaactgattgttccgtgcaaatacctcatgggcatacacaccggtgaagttcatgatgacaaccggccagacggtttctcggtccgccttcttcttacaccgtccatttgtcagtaactcttgcttattcatgtccgttcagaaccatcgtacataacaaaaatcttgccggtgaggtaacaggggatggttgggatacattctgaatgcctgtttgaagcttccagcgctgaacattctggttattgccttgaaagtgtataggtttccgtctttggatgtcaaagaaaaaggaatgacctcatggatgcgatcctcattctcctcatgccgtataatgaccgattccaatccgatcgcgttgtccagccctttctcgtcaatgacgaccgtcatctcgtattccttaccagcctccaccgtggcgtccaatccttttcccgcattcacggaaacgatttccacggcattccatctgctgtcgacagctgccttccagccggcaagcgttttcgcctttgcataattgtccgccgccaaaacatgaaagtgttccgacaacttgttgtaaaatccgtcatagtagtcatccagctgtcttttcatcgtgaagcggggagctatttgcgcaaccgagttcttgatgtacttgacccaggtttccggatagtctttttctttccgttcataatataacggcaggatattatgttccagcaggaaataaattgtttccgcatccagttggttctggtactgttcatcctgataggtggccttgtcggtgatggcccatcccgcctccttgcggtagccttcgtaccaccaaccgtccagcacggagaagttgagtacgccgttcatcagagccttctcaccggaagttccggaagcctccgcaagacgggtgggagtattcatccagatgtcaaccccagaaataagatgccgtgccaggtccatgtcataattctcaaggaagatgattttacccaagaattcaggacggcgggatatctccacaatctgcttgatgagcccttgcccggcagtgtcgtttggatgggcttttcctgcaaagacaaactgtatgggatgttcctgattgttcacaatccgcgccagacgatccaaatcggtaaacaaaagatgagctcttttgtaagttgcaaagcgccttccgaagccgacaagaagagcattcggattaaacttctcgaaaatggagacacccaatgccgggtcaacctggcttttgagccagtcccggccgcatttccacttgatgtaggatatcagtttggttttcaaccttttccgcatgttccatatctcttcatcgggtatattataaacgcctttccatatttcctgattggactggtcgttcatgaaattctcatcgaaattgtccttaaacagctttttccactccgccgtacaccaagtgggaaagtgtacgccattcgtcacatagcccacatggttctcttccgggaaatagcctttccagagaggcgcgaacatctgctgtgaaacggacttgtgcagcttgctgacaccgtttaccgcctggctggttttgcaggcgaataccgacatgcagaaacgttctcccttgttgcccggagtttgccgtccgaggttcatcaactcgtcccacgtaatgcccagcttatcaggatatcctttcatatatttattgaaaagcccctcatcgaaatagtcatggccggcaggcacaggtgtatgcacagtgtaaagcgaggaagccctaaccagttccatggcttgtccgaagtccaggccttcggatatatagtcgcataaccgctggatattgatcagtgcggcatgcccctcgttgcagtgatatacatctttctcgatgcccaatacttttaatgtcatcattcctccgatgccgagcagtatttcctgcttgagccggttttcccagtcaccgccatacaggtgatgggtaatcggacggtcgaactcgctgttcagttcattgtccgtatccagcaggtagagggaaacacgtcccacattggccttccatacattggcatggaccgtgaaactgtcggcatagggaacatggattaccagttgtcgcccgtcaggctgcatcactttctctatcggaagctgcccgaaattctgtgggtcataatgaacctgttgctgcccgtccatcgccagagcctggtcaaaatagccataacgatataaaagccctacagcgcagaggtctacgttactgtccgaagcttccttcagatagtcacctgccaatatgcccagaccgccggaatagattttaagaaccctgtccagaccatattccatgctgaaataggcaactgacggacggctgtggtccggctccacatcaagatacgccttaaaagtggaatatacgttttccatcttacgcatgaagtttccgtcatgtgtcagtgcctccagctcttcataatccatccgttccagaaacagtaccggattctgttccgcctcttcccatagttccgggttcaaaccactatataaactcttcgcatcctcgttccaggtccaccaaagattatgtgccatctccgcaaatctccgcaattctgccggaaggtgtgaaccgactgtaatctccctccattgtgggacgtttacatgataacttgaatattccataacattttacttatttgatagttcatgatttttttctgtggaggtttctcctgtttccggttcttcctgtggaaatgtcccggctgtaccctggaaattctcgaggaactgtttttccatacttagcgatcgtttccgtatccgcttggaaaaatagataacgacaatgatcaggaaagataatatcagtcctgaccccaaagcgacattgaaaagacggatgatgatacccattacgataatgatacagatcaacaccttgatcactatcattgataccagcagccccctgttgaacctgttgtccgcccaaagtttgcggaattcgacggaattgtttttcttcatgatgatggcgcacaaaaacggggatatgataaggaggacaagaacgaagctcagcaggcttcctttcatccccggaatacgtcccattaccagaggatacgcataggagaagaacagcgctatgaaaaacaggcataccaccagataaagggtgacggataccaacatggacctgatgagcttgtgccaggagccttgatgtcttgtggtcattgttccagaagaataatgcgtcaggtaatctttcaggaattgtggcaagtgcctgtctgcaaaacagtagacgggatccgacagtcttatcatataaggagtaaggaaagtggtgatgaccgatactgccactatgaccggataaaggtatttgtccattacattcagactgattcctaacgaagcgatgatgaacgcaaactcacccacttgtgccagggaaaagccggcttgtatcgcaatctttagcggttgtccggaaagcaacacgccgaaactcccgaacaggacctgcccgcataggaccagtgccgtcaggataaaaacaggaacggcatattcccatatcatggcagggtcgatcatcattcccactgatacgaagaaaacggaggcgaacaggtcctttaccggttgcacgatatgtgcgatttcttccgctttatctgtttctgccagcagggatcccatgacgaacgcacccagcgcggcggagaatcccgcctttgtcgctatcatcaccattcccaggcatagtcccagggaggttgtcaacagtatttcattgctaataaagcggttcaatcttttcagaagggtaggaatcagatagattcccaatgctgaccagaaaataagaaaggccgcaagtttcaatatgctctccagcatttcgaagccttcaaaatgcttgcctacagccaatgtggagaggaccaccatcatgattaccgccaccacgtcctcaatgattagtatccccaggacaataccggtaaatttctgatcgagaagccccatgtcactgaatgctttgaatacgatggcggtggaggacatggacagcattccgcccagaaagatacagctcgtgtgtgagaagcccatcgcattgcctgccgtatatcccaggaacatcatgccgcagacgatgataacagtggagaatatggccgaggctcccacacttatcagctttctgaacgagaaatccagtcctatggcgaacaggaggaaaataacaccgatatccgcccatatcttgatattggcctggtcggaaacagtcgggaatagggaaatggaaggacctgccataataccggccacaatatatcccactatgaccggctgtcccagccatttgaaaatgacggttatgataccggctataatcaagatagtggcaaggtctgatattaaaggggcaacttccgacataggagtaacattttatatggacaactcgttaaggacacggatcaggtttttgtcaatgggcttgtcgttcttgatagcctggtcaaaaggaacatagacaatctcattgttatgtatgcctaccatgatattgtgctggtcctccatcagggcctgtatggcggcctcacccagccggctggccaatatgcggtcgttggcacttggcgctcctccccgttgtagatgtcccaggatagagaccctgacatcatatccggggtattccctttttacccggtcggcatagtgcatggctccgccattcttattgcccgggctttccgtcacgatgacgatgctgctgttcttggtcttccggaatccgcgtccgataaaagtctccagctgatccgcatccgtccggtcttccggaataatggcggcctcggctcccgaggctattgcgctgttctgggcgaggaaaccggcgtcgcgtcccatcacctcgacaaagaaaattcggtcgtgcgaggtggctgtatcccggattttgtccacacactccacaatggtgttcagggccgtatcatatccgattgtaaaatcggtaccgtacaggtcattgtcgatggtaccgggcagtcctatgcacgtgacagggtattcctcggcaaatatgcgggctccagtcagtgagccgtcgcccccgatgactaccagcgccccgattttttctttcctcatggtatcgtatgcctctctgcgtccttccggggtggtgaacgcttcggaacgtgccgttttcaggatggttcccccacgctggatgatgctgctcacatcctcggtcgtaagttccctggactcgcccgctatcaggccttcgtaccctctgtaaattcctttgactttgaagccgttgaaaatggcggtacgggtcacggcacggattgccgcattcattccggaagcgtcccctccggaagtaaggattcctatatattcatcttttttcatctatctcagttcttgttttgtttcattctgccaatatagctttcagttttttccggcagtgaaaaatacggctctttatggttcccaaactcacaccggttctttccgctatctcacggtatttgaaccctgacaggtacatctcaaaaggtatgaaatgcgactccggtatacttttgatggcattacgtatcttttccaggtcatagttcctgtccacctcctctgtacgggactcgtccatgatccgcgaataatatgcaggatcggaggatatgtacagacgggtatgaccgacctccgcccggtaaccgttgataaacgtgttacgcatgatgataaacagccaccctttgaaatttgtgttcttgttgtaactttctttgtgaagcattgccttgagcagggtatcctgcagcagatcttccgccttctccctgtccgctgtcagtttgtacgcgaaacggaacagttcgtcctgtacgctaagcagctctttttcaaaattgaattccttcatcggttgtgccggttccctgttccggaagtgcctgttaaaggccggacggctctccggacaggaaaagcctgtccggccttacaccattccagatatggaattatttaacctcgatagccttggaagttttttgtttttcttcctccttcactttcgggatttcaatggacaggatcccgtgttcgacttttgcggaaatcttatccttctccacgttttcaggtagcaggatggtctgctggaacttggaataagagaattcgcggcggagatacttcttgtctttcttctcctccttcttctcttctttcttttccatgcagattgtcaggttgttgttttcgtcaacattcaccttgaaatcatccttcgtcattccgggagccgccatttcaaccttgtagtccttgtcattctcaatgacattgatggcaggagccgtaactcccgtttttgccagccactcattctcgaagaaatcgttaaaaatactcggcaaccagtttgaatttgtttttacaggtaccatttttacctccttttttaaattgttaataaataaaatattcaaaaagacaatacaaatcagtctgattgactgactcttatcgtctgatcataccttgttcggctacagcctccgtccgtctccgtatctcctcctggtctccgaggaaatagtccctgacaagcaccggccgttcatcaaattcgaatacataaggtactgccgtgggcaggttcaagagggatatgtccgtatcggaaatattcttgagatgcttgactatcccgcgcagactgtttccatgggcaacgacaagcaggttgtccctatgcatcaatgtgggtaggatgacacattcccaatagggcatgacacgcatgacggcatccttcagggattcagtccgtggcagttccatttcgggaacaccggcgtaacgggtgtcgttccccggatagcggggatcgtcttccttcaccggctcgggcgacacgccgtaacttctccgccagatatggacttgttcctcgccatatttgtctgctgtctcccttttgttaagtccctgaagtatgccgtagtgtttctcgttcaacctccagcttttctccaccgggatccagtcttcattgagacggtccagaacacaattcaacgttttcacagcccgtttcagataggatgtgtaagccgcctcaaaagagaatcccgcttctttcagcatatcaccggctttacaggcttctgcgatccccttatcactcaggtctacatcggtccaaccggtaaagcggttttccttgttccataggctctcgccatgtctcaacaatacgatccttttcatgccatatagtttttatgcaacggttatcgaaggatccagatagacatcctgaatggtgttcagaagcgagaccccgtctttcatcgtcttctggaaagcttttctcccacagataagtcccatacctccggcacgtttgttcaccactgcggttacgacggcatcatgcaggtcagatgtcccatgggactcgccccccgaattgatcaggccaacccttcccatatacccgttggccacctggtagcggcagaggtctatcggatggtcggagaccagttccgtatacatacgcccgtcggtcttaccgaatccgatggctttaaaacctccattgttggacggcagcttctgcttcacgatatcagccttgatggtgaccccgatatggttggcctgccctgtcagatctgctgccgcatgatagtcaatcccgtctttcttaaaactgctgtttctcagataacaccacaataccgtggccatccccaactcatgggcatattcaaacgcctgtgagacctccacaatctggcggcggctttgttccgaaccgaaatagatagttgcccccacggcaacggcacccatgttccatgcctccttcactgtaccgaacatgacctggtcataactgttcggataagtcagcagctcgttatggttcaacttcacgatgaaaggaatcttatgggcgtacttacgtgccacagctcccagaactccgaatgtggatgccacggcgttgcatcctccctcgatagcgagtttcacaatgttcccgggatcgaagtaaagaggattgggtgcaaaggatgctccggcagaatgttctatcccctgatccaccggcaggatggagacatacccggtattggccagacgcccgtgcccgtacagggcttgcaggctctccaaggtgcgtatattcctgtcggaatccacccatgccttgtctatcatattcggctcggggatatggatgagtttcttgtctattgtcttgcatacatggtccaggtagtatcctgcctgcgttcccaacaaatcaataatcgtgctcatgtcagtcgtttttttattccaaatcaggactggcgttcccccagttttgcatccatgaaaaggatgccgctctctccggctttcttcatcaggtttacgatgttcaggaaattcgcctcttcctccacctgctccctgacaaatccccaaagaaaatcacgggtggcattgtctttctcctcggaagccagatgtaccagttcgtcaatcaatctggaaacatgtctctcgtgttccaaggcatgttcaaagacttcggtgggactgccccaaccctgtggaaccacatcgaccttgtccacttttgcctccgcctcacgtttggccatatattcggcgatggcacatgcgtgtcctgtctcttccgccgattgcttgcgcatccagcgggccatgccggaaaaaccttccttttccagatagaaggacattgaaagatacaggttggcggaccataattccgcagtaatctgcccgttcagggccttttgtaaattctcggtcataatgaatctaatttttaatgttggtactattttttatttttcatattcaggggcaagcgtgtgcttgtctcaaaatatctgtcaggacaggttgcatcccgtttatgaaacattccacggcgatgaccatcagaataagccccatcagtctcatcatcacattatttccggtttctccaagaattttcaaaagccgcgttgacacgcaaaggataatgaaagagaggagacagactagggcgatcacgcaaaccagtgcaattttgaaaatatgctcaggggcatcttccatcagtgttatgccgcttgaaattacacccggaccgcacagcatcggaacggcaagaggcgtgacggtgatgttcctggaatattcttttttctcgttctcgttcagtttcacatgggtgaagtgtgcctgcagcatgtcatatccgattttaaagatgatgatacctcccgcaatccggaaaccattggtcgagatcccgaaaaaatggaacaggaacctgccgcacaaggtgaaaagtaccagtatgacgaacgtgagggcgcaggattttaaggcgatgctccggcgttctccggcactcatgccctcggtcatctgcaggaaaaccggcatcactccgagggggtccatcaatgtgaacaacgaagtgaaacacaacattgagtatgcgaatatatccataggatgatacttgttttatttttagaccattattttctctgtgaacaataaactccggtcaggttacacgatttgacacatcatatgaagcagggcagcctgcgttcatattccatggccaggatacgcaacaattccataaacgccgtacttacatatatccgttttgtgtacagccccttgatgaaagaatggatggatgaatccgtattctggcatagtacgtgaagttcggatatctgacgggatatatattgttcatgttcaagcagggtgttcaaggcagccagcggtgtcggccattgccggatgtcgcgcctgatttcatggatggttacagcacctccttcatgatagatgcggttcatcatctgatagaccttgcccatattgtcctgtgcctgtgcacttagccatgaggccaatatcagaagttgctgcccctcaaaatagacctgcaatgacaggtacaggttagttgaccagatttctgtattgatcaatgtgttcatcgcatattcaattcgtttatccatggctgttctgatatttgaaattagacaaaataaatcgtaattcatatcctgcaataatcatgaatttatgtgatagcatctgtaaatcggactcttatggagttgtaaaatgaattttaatgcttgcgagacaaatagtcataaaaatgtataattatcatgcctttttgtcacaagatccctacaacattctcaacaagatatccagttctttctctatcatgttgatcttgtcgtatatgtaatccagcgtattatgatagtgcaggtaggccctgcattcctgcaattcccttgacagggagagtatttgttgccaaagttcctcttctgtatgtccagggggattattgaatgccataaatggattcagagaaactgtttggcatgtaatttgtgtaataatagccgcaagtcccgaaaaggggcaggaatggaaacaaaaaggcagagaattccactaaagacagtaacagacagaggaatgaaaacggaaggcaggacctgtccggttttgaaacaaattgctttcataatgcgattatatgacaactctgttccctgaagttgtgtttatataaagttaagcgtgggaactttggtattaccgttcagaagtatccccatactcaacaacatataatacacaaagccccacgcctatatatgctaacaagatataatagtgcatagggacacctgatgtattatccaattgttgtcttgaaattggggatttcctgaacatggataatgcctaacgcttactgttattaatcttttttggtaaaagacaaggcaaaaatactaaaagaattgattcgcgtcaataaaaatccaacttttttattattttactctctgcgccactgaatttcatcgctctccgctctccaaatcccgtgcccttcagcgataagtaatcctgagttcatcaattgcctcataaaagagcttttgtacatcctaaaatccgcaacctgtaatatttttgatatctggggttgcagatacctctctaaaacgactcgttttcgtaaagaaccctaatggtgcagtcgcaagagacaaaatccccttaccccatgatgcgacttgaggcaatacgcaaaaggccacgaagatttgaggctacccaaaatcaaatttgaaggccatcatgtatgcatcattgcttgtgtatatgttcagtatgtgctgtcttgcagtcttaatccattttgcagggacagaaacatacttgaatacaaaagttttgattctgcttgtgcgtttaagtccaaagctcttcatgtttgcgtcagatatgaggtgtctgtaaaagtttcgtattaaagcggtcagaagcaggaacaccgtgttttccgccatgaacgattttggcagccgtttccagccaaagccgttgttcatgtcgtccaatacacgctcagcaccgccacgcttgttgtaatactccacgatgtcacggtctgtcgaagtatagtcatttgtcagtatgcatctgtatgtatattccccttcccacaggtcgagttccttgttgatgcttctttgccgctgtatgacaaggcggtacgctttgccgacccatttctctgcaatgatggagcatatctcaaactcgtgaccgtttatgtattcggtcttccatccgcgcaaggcaaagatatcgtcatacaacgatacacacctgtttgcgcggatataaaaatgccgactgtgcttctccaccatttccaccatagcctcagagcatgagccacaatccatcctcgcacggtttatatgtattctggcattctccaaacgctcaaaaatacgttttagagtgtcttcctgatggaaacggacattggtattgccgtcgcggttctctatcccgacgatgacatcgccgaccgttgctattcctggactgtaaccggtaaacttcttgtaggtcatttttgcgtcaaatttctccgtctcaatgaactggtggtcaaaatcaaagtcatattcattgtctggcagcaactgtccagttgccagcaatgcattgacaagcagattgttaaggtcggaagccacgttgaagtcgtagcttttgcccgaatcagacctgtaggtcagattcggtgtggtcaattcacgaatggccctaagtattgtgtctgcgctgcatgtacggaggggtggatgcaagcaaagtgcttccataaggtgtgaggtcacgtcttcgacacatgaccctccacagaaatatacgcacatcagagaacgtattatctcgctatattgatagccatacactttgctacgcaaacctaaagtagagtctattgtacaagacaacatcctgtcgaatttctccataattggaaatataccaccaaaagatgtgagtttctcggattttatttgtacttttaccatgcttgatgaggttttgtttgactatttttgcaacactaagttaagtgaatcctttgacatgacaaaatcctgagccgctcggctttgccgcttggcttgtccaagaactttttgttgttcaggatattataaaagttaaaatttatagtgttgcggaattaaggtaataacaatactatgaaatcgttattcatattacaacttgtatgttgcgtcattacagccatgctagcattgcaattagccatggcaagtttgcaggtgagatggaaggtgtggcgctacgaaatatcaagatggattctcgttgcatccatgctattcttctccgtccactacctcttacagatgattcatggactccgtgcacaaggtaccgatgtgggcgcagcattcaacatattgttctatactccagtggcatttgccatcactctctccataatcaacatagagagcacaggcaacaaagtgcgacggtattgtttacgtggtatgatggcatacatactcatcgccatagttttcgtcattggcatgttcaaaagtcaaagtttacacattggcaatatgctctatgtgatgctcggtctttttgtggctagcatggcatattttattcttatcattcgcaaagaaacaaaagcccgaaagcagaagctcatggagaatttcggaatcgacttgattccatacgtgcgctattcgcaagccagcatcattttgctatactttgctgctggactccttcctgtagcaatcctcttcaataccttattatatataataggtcccttgatattactctctgtcatctttttcgtccacactttcattgctatgggctattacatcacacccaaagaagtcattcctgaggaaaatgacgcagaagcaaaagtcacggaagcagaagacatgaaagacggcaagaacactcatggcacaaatatcttgacagctaatagaaagatggaaatagaattagccctcaagaaatggtgtgaagagggattttataaggactatgaagttaacatctattcgctagctaccaagttgggatacaagaaaaacgaactgacagaatacttcaatcagtcagaatacaccaattttagaacctggcttagcgacattcgttttaatgaggctgttcgcatgatgaaagccaaccccgaatatagcattgacgctatttccacagagtgcggtttctcatcccacacatggatttatcgtatattcaaacaaaaaacgggcatgtcacctagccaatggcgcaaacagtttgcctccatctaaatgcgtatttttgtaatttcgcattaaatagcatttaaaagaggtgtgtcagcgttttgacacaacctctacttaaaagatttaatttacaatagtattgcggaattaaggtacatgaaaccgataacctgtcatagtggcattgggaaaagccgttcagacgatccgcatcatggtcggcaaaagatctaaagtgacctctttggctgtcttgcgcttggagacatgaatcatttcaagcacctttatgacgtcttcagacttcgtgccacgtatcatggtcacaagtgtacctctgccaccacgtcccgcacgattagtgacaacagtatataattctccgcagcttaaagaagtctcgtcaatacaaaggctagggacctgaggttgtgcccgcattctgacacatttacatttgtagtattaaatatcccaataaaaatataagtgtatattgtaatgggatcttaatagaggattaaaaaataaatacttaatgggctgtttcttatgaattctactgaaatcttataataattgctcaaaaaatcacattctttgtatacgtaatatcctaattttggaacgcaaattaaaagaatattaataaactaaattatctgatttatatgacaaaattaagatgtatgctttgttgcctgatgatctgtactattactattgatgctaggactgttaatgatatatataaaagaatatctgcacaagtctccttgaaggttcccggtaatcaatcacgaaactattcccttgcttttcaaggagccgttgatgataagggaatctatctgttagagtctgaagaaaaaataccattaatcattacagagagaatagaacgtgacaatgttaaatgtgtaatggtagtaagtattacggcattggaagacgtgtactttaattatcaacaacagttgaaaacaggcttccgacataatgactgtatgttttatctaccaggattctggtatagtcgcaatttacgttctcctaaaggtgctccttcatttcatatatcagagagttggctggtacgtgaggatcgtctgagctcaccccttaccggtatcttcaatcagaaagatggacgttatatgactgtggcacgcaaggacgattttcaatgggatgcccttgctacccaccaaacaggcgaaatcatcctctcgggcaaaacgtccctagggttcaccggctttgagagccatgacggaacatcaacactatcttttggatttccttaccgagaagctcctaaaacctatattcgtaagttgacgctggctccggaggttacatctttccaatatctaaaaaaaggagaaacagtactcctgacctgggaatttatcgaggggcaggctacagactactcagattttatttgccatacttgggaatattgttatgatacataccgtccccaacctgtgaaaatacctttttctccagaagagataaaaggagtgctgagcaattattttgtggaaagttttgttggggacaaagctcttgcctattactccagccctgaaatgaaagtggcagcctgtgccaacatgaatgtagcagagataggttttgtcggtcgcgtacttctaaacgctttcaatgcatgggagtttggcaatgagaatggacgtgatgaccttgcagctagcagtaaaaagatatttgatagttacttagaaaatggctttacggaaaccggttatttgcgtgaatgggtaaatctggaaaatgatagtgatgtgaaagaagaacgcccagtgcatagcatacgtcgtcagtcggaaggaatttatgccatgtttcattatctgaattatgaacagaagtataaacgtcaccatcctgattgggaacaacgcttaaagaaaatgctcgatatgttcttgcaactgcaaaatccagatggaagttttccacgtaaattccatgatgactttacagttgttgacggaagtggaggaagtactccatccgctacattacctctggttatgggatataaatattttaaggacaaacgctatctgtccgctgcccggcgtactgcggaatatctggaaaaagagcttatatcaaaggctgactatttctcctctacgctggatgcaaactgtgaggataaggaagcttccctctataccgctacggcaacttactatttatcattgataacaaatggtacggaacataaccactatgcctctctgacacgaaaagcggcttattttgccttgtcctggtattacgtctgggacgttccgtttgctcccgggcagatgttgggtgatatcggtctgaaaactcgcggctggggaaatgtctcggtggagaataatcatattgatgtatttatttttgaatttgccgatgtgctccgttggctttccaaagagtataatgaacctcgtttctctgattttgctgaagtcatttctacttccatgtgccagttacttccttataaaggacatatgtgtggagtgataaaagttggttattatccggaagtgatccagcacaccaactgggattatggaaggaatggaaaaggatattataatgacatgtttgctcccggttggacggtagcatccctttgggaattgctgacaccgggacgtactgagaatatactgttgaaatagctctgatatccacttttcaggatattcttatatcctgttgtatgttaattaatgaaactaacaattaagacaatgcagagactacgtattttagttatattaatacttctttctttgatgcctctttattcccttgccgttctgaatgaaggacaatatgcattccgttcacttgatatcaataatggattatcccagaatacggtccatgccatccttcaggataaacaaggatttatgtggtttgggacgaaggatggtcttgaccggtatgatggtatctcttttcggactttcatgaaagaatccggaaccttgggcaataatttcatcacttctttgtatgaagacaatcttgggcaaatatggattgggacagacgtaggcctatatgtctattgcccacaaatggaaaaggtcaggcattttactctgataagtaattcaaacatagatatagactgtacggtcaatctgataactggggaccagaaaggaggtatctgggttgtaactcagacgcggggaatcttctattacaatccccaggatagccagttggttaattatcagtcggacgggtccggtactctgaaccttaaaacttccggccaactctattttgattcggacgatgtctgctggttggacatacgtgatggaaatctgtattattcaaaagacaagcttaaaactttaactccgatttttccagaagattcaaaagtgtctttcagagatgaatacatctataaattgctccccggaccctataattgcatgtatgtgggaactgtattcggactgaaagaagtgaacctaactaataagactatccgtacccttctttccaaggatgaattgggaggtgatatttatatcagggaacttgcattttattcagatgacgaattatggataggaaccgaatcgggactttatatctataatctgcacacggcaaaaatcatccacttgcagaacgtcaacggtgatccctattcaatctctgacaatgccatctattcgattctcaaagaccgtgaaggcggaatgtggatagggacttattttgggggtgtgaattattacccccggcaatatacctactttgataaagtctatccccagaaagaatcaaacaaaatgggaaaaagggtgcgggagttttgtgccgcccatgacggcacactctggataggtacagaagataaggggcttttccattattatcctagtactggaaaaatcgaaccgttcattcatccggatatttatcataatgttcacggattgtatttggacggagattatctgtgggttgggaattttgcaaaaggattgaagcgtattgatttgaggacatacgctgtaaagcactatgataatattgcaagtgatatcttttctatctgccggataactgcgggcgatctgtatcttggaacaacaataggattgtttcggtacaacccagatacggaacgttttaaacgcgtccccgaacttgggtggacgtttgtttattatataaaggaggataagcaggggaatttatggctggcaacttatgccgatggcgtctataaaaagaatgtccgtacaggtggttgggaacatttcgtacatgaggaagcagactcgtccacccttccatccaataaggtgctgagtatttttgaagacagtcaaaatcagctatggtttaccacacaaggaggtggcttctgccgctttgtgccttccgccaacacctttgtccgttatgacggtatcggtctgccaagcaacgtcatttatcggattgaagaagatgaaaagggattgttctgggtttcaaccaataaagggctggtgcattttaacccgaagaattccagttttaaagtgtatacagttgctaatgggttgctgagtaaccagtttaattaccagtccagctataaggataagaatggacggatttattttggctgtattaacggtttcatctcctttgccccctcctcctttattgataatgattttttaccctctgttttgattaccgattttatgctctttaataaaaaggtggtagtcggagaaaaaggctctccattgaaacaaagtatcactttgtcaaaccatatcgaacttcagtcaaatcagaattcgttctccttcaggatagctgcgataagttatcagtcaccgagcatgaatacactgctatatagactggaagggtatgattccgaatggcatacagcgggtaagggccctattacgtattccaatttaccttatgggacatacatgttacgcgtgaaaggtgcgaatagtgatggtgtatggaatccagatgtacgcacattggggatcaggatattgcccccgttttatttatccgtatgggcatacctgatttatatcctattgatactcggtacatttttcgccctcttcttttatttaaggaagcgtactattgaaaagcagcgtaaagagatggagaagttcgaacaggaaaaggagcaggaactctacaccactaagatagatttctttacaaatgtggcacacgaaatccgtactcctttaacactgataaagtgcccattggagaatgtacttgctgatagggaactctccgaaaatgtaaggatggaattggaaattatggatcagaacgtggagaggttactgaacctgataaaccaattacttgatttccgtaaagcggaaaataaaggttttaaattgaatccgaaagaatataatatcggtactatcgtccactctgtttataagtatttcaccactttggcaaagcaaaggggaattaaacttgaagtagaagttccagaggaagaattgttggcttctgttgacaaagaggctttgaccaaaattctcagtaatctgtttgctaatgcattgaaatatgcccggacatacgtttatctccatttgtctgttgatgagaagaatgaggtgttcactatctctatgagtaatgatgggaatatagtccctatcgaaatgcgtgaaaatatttttaaagcctttgtccaataccgggacgggaaagatattgtctcgggcacaggcatcggattagctatggctcgttacttggcagagttgcatcaaggtatgctggtgatggaccgggagctagattgtaaccgtttcattctttccattccaatattacaccagacacttccggatgattcggaagaacaacataagaaacctgggtatgatgatgaagatcgtgaagtttctgataaagataaaagagaggttgcttccatattggttgtagaagataataaggatatgcttgcttttgtgttcaggcaattgtcttcattgtatcatgtactgattgcggaaaatggggtcgaggcgttggacgttcttgaacagaaatctgtggatctgataataagtgacattatgatgcctctgatggacggggttgaattatgcaagcatctgaaacaaaatctggactatagtcatattcctgtaatattattgacagctaaaactaatctggaatcaagaatcgaaggacttgaagaaggggcggatgcgtatattgaaaagccgttttctatggagtatcttcgtgccaatgtagcaaatctgttgagtaatcgggaaagattacgccgtcactttattgaatttccttttatcaaagcagatgcaatggcgcagacaaaggccgatgagatgtttattagcaagttaaatgagtatgtattacgccatcttgataatacggacctgcaaattgatgatatagcggatgcaatgaatatgggacgttccaacttttaccggaaattgaaaggaatcctaaatatgagtccgaacgaatatctccgccttttccgtttgaagcaggcagcttccatactgaaagaaggaacctatggagtggtggaagtctcttacatggtagggttcagtaccccctcctatttttcaagctgttttaaaaaacagttcggagtactgcctaaagatttcatatcgcactagtaatatgtattttgctttaaattttataatatcaggtcattttctgatattttatccgagttgttccgggtaattttgcaaatatattaacaactaaatttgatgtatgacaaggtatttacttttttttgccagccagccttcgggcggaagagagagttgttttcctatcgtatatataaacgattcttagtttgagaatttgtactgtaatttatataaagtcaaagaaataattataaaataaattgcacacacaatgaataatagaaaagaaaatgaacagagttgtatagtaatgaataaaaaagagggtacatcgtgcattacgacacacctccctgtatttcagagaaaaatctacactactaatcaaaaaatctattgatatatgaactgtaaagtaaaacaaggatgccttaccagcgaaagctgttgcatcctgttatggttagccttcacattatttcccgtttccgttgtaacggcggcagataatagaaagatcgacgagagccagcaaaaagaagtaaaagcagaaatgaaaggatatgtgggagacgaaaacggagagcctgttattggagctaccgtattggaaagtggaacgcagaacggggttataacagatgtggacggtatattcactatacagttggcaaagaacgcatcattgaccatttcatatgttgggtaccagaagaaaacggtagtggtaaaagataagaagttcatttccgttaatttgactccggacaggagtatgatgctggatgaagtggtcgtggtcggttttggcaaacaaaagaaagaatccctcgtgggagctgtgcaggcagtgaagccggaagacctgaagatgacatccagtaatcttagtacttcatttgccgggaacgttccaggtatcatcgccgtacaaacacagggtgaaccaggctctgatgaggcgaaattctatatacgtggtatatcaacttttggttcgaatacctcaccgctgatcatacttgacggtgtggaaatcaacgctacgatgatgaacaatattcctccagaatctatcgcgtcgttttctgtgctgaaagatgctacggcaacgtccctatacggctcacggggggctaacggagttatcatcgttactaccaagcaaggacagctttccgagaaaatgtctgtagatatccgctttgataatactttctccatgcctacctatgtgcagaaaatggcagatggcccgacttacatggatatgtataatgaagccgtttataatcaggctattgccaataaccaagagtatgagcctttctatagccgggataagatagataaaacacgtgccaatgcaaatccctacctgttcccaaacaatgactggtacagtatgttgttcaaagacttcgccgttaatcagaatttgaatatctccatcaagggcggaagcaaaaatgtggattacttcctgaatgctggaatcttctatgaaaatggtatcatccggcaacccaaggaagataagcttgatgtgggtatgcgcaacaagaaatacctgtttcagagtaatgtgacagcccgtgttacctctacgacgaaagtggggctaaatatgaatacgcagttgttctaccaccatgcccccaaaacaagtacccggaatttgttcgcctattccatgcatgggaatcccgtacgttttcctgctacacttcctgctgaaccaggggatacatacatccgctacggtagcaatgatccgtgggatgtgggaaaatcagagccgaatccttacgccaaattgagtgaaggttatacggaacgaaattatgtctatatgacgaccgctttcaatctcgaacaggacttgaagtttgtcacaccagggttaaaactcaccggactggcatctttctataattacagttttaactggctggatcattggattgtacctttctactataaagtatctgatgactatacgatggatgatcagggaaactacctttataagacttcgactatcggtgagccgggagaaccttatctgaagagcaattccgggcgtgatccgacagagagtgtctggtctttacagggagcgctggactactcacgccagtttggtggacatgatgtgggagctacccttgtttaccacatgaaagaaaccaagaaagtgaaggacggcggagctgaaaaagatcttcttccttaccgtgagcaagggatggccggacgtctgacctacagttttggtcagcgttacctgcttgaggctacctttggttataatggctcggagaatttcagaagcgggcatcgtttcggattcttccctgcgattgccctaggatggactatttctaatgaaaagtttttccaaccgttaaaaaaaacagtttccactctgaaaatccgagctacttatggattgaccggaaatgatgcgcttgccactcgctttccctatgtaacagaagtcagtatgaataataatttggattggtggactggtagcggtacccgcgtgaatgggccgcttgtaaatatttatggtaatgcgaacgctacatgggagaaatcgaaaaagctgaatttaggtgtcgatatgacccttcttgaatctatggatataaccattgattatttcaaggaagaccgtagtggaatttttatgcaacgttcgtccgtcccttcaacaatgggagtgacaggtatgctgccttatgccaacattggctcggtaaagaataagggtgtggatatgagtgtagcatacagcaaagtaattggcaaagattgggtgctccgcctgaacggtagtctgacctatgcacataatgagattacggagatagacgaaccggtgaatgtagaaccctattcttcaagaatcggacacccgataaacagtattatgggatatgtgtctgacggattgtttacttctcaggaggaaatagacagatctcccaaacagtcgttcggaaattatacggtgggagatattaaatataaagatctgaatggtgataacgtggtgaatggttatgacaggacgattatcggcaatcctgaaattccggagattatctatggttttggaggaacgttgaagtataaaaagtgggatttgtctctgtttttccagggagtggccaaagtcagtttaatgatgagcgatattcatccgttcagcgaagcgggccataaaggatataacattgcacagtatatcgttgatgaccactggtcggaaagcaataatgtagccggtgccgcctatccccgattatcacccgaatttatcacgaacaatgcgcaaaccagcacttattacctacgtaacgcagctttcctgcgcctgaagaatgccgaactgggctattccttcttcccgtggctgcgtgtgtatgcagcaggtactaatttgctgacattctctccgttcagtacctgggatcctgaaatgggaagtgggaatggtttgaaatatccgctacagcgcacggccaagatcgggattcagtttcattattaattaagaacagaataagttatgaaaaatatatatacaaagttatgcctgtcggcaatcggctgtttaatgatggcatcatgtgattttcttgatgtggttccgcaaggtactgctaccgtggatgatatctaccggacacaatatcaggctgaaggaatggtactgtcttgctacgcgaatatccctaactatttccatccccaacaatttcctgattttaccggaggaaacgaaatcataacgagcaaaggaggaacaacgcgctggtttcatttccgcagtctggtttatggggaagaatccccaacaacgacttattactcattatggagcaatacagcaaaatcttatccgcagggtgctgtgaagaaagcagtatgggaaagtatccgcaattgctataatgtgcttaataatctggatagggtatcggacattacccccgaaaacctgagctggtggaaaggtgaagcgctgtttttgatcgggtattatcatcagatcatgctggagtactatggaccgatagttattattgacaaggaaataccaatggaaagttctccggccgagatgatgacctcccgttctccttatgatacatgtgtcgatttcattgccaataaatattcggaagcagctagattacttcctggcgtatgggattcaagtaagagaaacagggctacctcttctgctgccttggctttcaaggctcggctgttgctttatgccgcctcgccgttagtcaatgggaatagtgagttttattccgactttaaaaaccccgacggcacttttctgattaaccagacttatgaccgggaaaagtggaagagagcgatggatgctgccaaagaggccatagacctttgcgaagagaacggttacaaactttatggaaattcgaccaatgacttggagcaagggaagaaaaactatcatgaagcctttgtcggtgatgggatcagtggtagcggatttaactggaatgaagtcctgtttggctttgctgaacagggaactatttcctactgtatcaagaatatggctcctcgtgttgaatttacaagttattcgaccaaaggttttagagggtccttattcccgacgtgggattgtgtgagtaggtattataccaagaacggtctaccttgggcagatgaccccgagactaagaagcttgatccgtattccattgcaccaggtgatagtacggtacgttttcacaggaatcgtgatccgcgcttttatgcctctattggctttgatcgtggaaattatgacgtgcagggaaagacaatagtgctcaaatgcagacgtggtgaaatgcagcagaataatggcaatgccaaggatgagtatcaaacggacaacggttattattgtcagaaatgggtgtctaaatatgatacctataataggactaccgatcaaataacctacaaccgttggtgctttccttatatgcgtctggccgaactctatctgagttatgcagaagcggatttcgaatatagcggcacactgagtactgccagtctgtcctatttgaataaagtacgtgaacgttgcggattacctacctttgcagattcatgggcaaaagccggtggtattccttcaggagagaagttgcgcgaaatattacatgatgaacgctccattgaattggctatggaaggcagacgtttccatgatatgcgccgttggaaaattgcccatactgaaatgatgcgttatcagaaatcctggacattatccggaaaaaccgctgatagtttttataaacttacggacatgaaagaaaccggcgttcgtaattttaccgctcccaagaactattggcttgctattccacaagatcagatagaagtaaatcccaatctagtgcagaatccgggatactagagaatcagctcttatataactaacaattagaggaaaggacaaaatgaaaaaggtaatgtgtttattggcaattatgtttatgattgccaatacttcggcacaaacacgggtgattgcccatcgtggtttctggaaaacccaaggatcagcacagaatagcattacatctttgttgaaagcggattctataggatgttatggttcggagtttgatgtctggctgacaaaagataatggtttggtggttagccatgatgggattattcaagggcataaggttgaagagtccactctgaaggaattaaccgggttatggttagcgaatggagaatgcgtaccctccttaaaagagcttctggaaacagctaagcggaaaacatctttgaagctggtgctggagttgaaagctcatagtaaacccgaacgggagataaaagctgttgaagagatcgtttcgatgataaagaagatgggactcgaaccccggatgatatatatcaccttttcgtctcacgcattaaaggaactgatccgtcaggctcccacaagcactcctgtatattatctgaaaggggacttatctccacaacaactgaaagaattgggtagtgccggaccggattatcacttctctgaattttaccgttataccgattggattgaaagttgccatgccttggggctaaaagtgaatgtatggacggttaataaaaaagaggacatgcaatacttttgggataaagtcgactttatcactacagatgagccgttgggactgttgaaagatataatgaaggtcaaatagatatattttctgagataatgtatagtccaactgattacctttaataatctgttgattatttatgtttttggaaaatgagtttcaagttttcaaacgactgttcatgttgatacagttgaatgctgattgaaaacaaaacaatagcggaaacaatgaatgtcaatcttgtataagaaggcaaacgtccaaatttatagttcagctccattaatcgaactgaataggggtatttattaaataatataaaattagccaactaattcatagccaaattattgcgaattagttggcctttttgtatctttaggtattccgtgcgacaagaagtcgtacaagtaattgttcagcactgtgcctgaacctattgttctgtcaatagtagtctaaagaggcgtgctttaccagtcatggtttagtgcgaagccctcttgacaatgcagtcctttacagaaatatccaatgtataggctgttaggctgactgatatgagtaacatatgtgaatcgctacaccatcgtaataaagaaatagcttacggatatttataagctatagccaaaaggtgggtagtcaggatagtcttttgggaatgtaaggctacacggacatcatactggcggtggaggggcgggctctaagtcgggcgtcagttacttgtacggaacttggtaaacccgtatttctcctgtctatgtcaggcaggtaagccaattgcaagaaaagccgaatgtggtgcgggtaaaggattgcggagaaagtgaatgattctgtgtaatgcggaggatagaggtttaaacatcaccccatgcgaaatcaggcagacttccgcagggtaattctttgtgaaacgattgtagaactttaataaaatgaagaaactgcaaatgagcaaggcaaaagccgagtgtgcatctttaaccgtacgaaacacgacatgaaaagatatcgattcttccaaatatgagcgtaaagtgagaaaactgcaggtccgaatagcaaaggcccacaaagaaaagaggtacaacaaggtaaaggccttacggtacctacttgccacttcctacgaagccaaggcattggcgataaggaaagtaacttccaataaaggtaaacgtacggcaggggttgaccatatgaagtgggacactgatgccaagaaaatagaagctatatgtttattgaaaaggagaggatataaggccttcccgctgaggaaggtcaacatagccaaagcaaatggcaagacaagatctttgggaataccaaccatgaaggacagagccgtgcaggatatatcttatggctttagaacttataactgaaagtgaagcggatgcgaactcatatgggttcagaaagtttagaagtactgcggatgcaatagacgcacttcatagatggttgagtagagactgtttaccacaatggatactggaaggtgacattaagggttgttttgatcatattaatcatgaatggcttctcaacaatgtgtagattgacaggctggtattaaggagatggctgaaaagcggagtagtatttaattgcaaagtatcaatagatacgctacactttttcttttcgttggcaaatcttaatccgtatcttcgttgcatgaaagaagatatacggatgcgccaaaaatggcttgagctatacgtcgaaacgggttctgtgacaaaaactgcccttcggtgcgggattacccgttccacgttataccgttggataaattgcgagaaagaacaaggcaagtcggaattgtccgataagtctaaacgttcatcaagacttgccaatatgaagataacacctgaaattgaaaccattatccttaatctgtgcgtgagacaagaagatggggagcgcaacggattgccaactatctgcttaggaagagaataaagctctcaggcatgacggtgtggcgtgtgttgaaaagcatcaggtcaaagctgttgtgaaacgttgcgagaaatttatttcttcttccagccgattttttccatcggcaacatccggataaccatatacccccgccgttgttcatagcggcaggaaaaacatgcctgacggcgatacgtgacgcacggcactcaaaccctctattccaacgtgaaactgaccgcagagagggatgccgccacgggcgacctcgtgtggaagtccaaggacaacacgacacttgtggggggattgtcggatgagcactactacctctactatccctactaaacggatatgagcggaaagactgccactcccacaggctcagccttgaccgacacggaattcttcgccccgttggtttccgcttggcagcctcaggacgaccaaagtactcatgcggcatataccgcctccgacttgatgactgccgaaggctccgcaacgacaggggaagacaacaccctccacctctctttcaccatgaaccatcgtatggcattggccgtcatcgagatgccgaataccgttaaatacaagtttaccgacgagaggattcctgattacgccgtgtcacccgccactacattctctggcattgcccagccgctgcgcgtgaacgatggtacataccgctacttggtgaatcacgcgactcccgcaccgactatcgaaggacattatgacgagggaagcaaggagttcaccataaccccgtccggcctttctaccggcagttacaagagatacaaggtggacggcgcggtgacaactgtaaaggactacacgatgcaacggggagattacctgctcgccgacggcaacctgctgcctaagggtactaccctgaccgaggagcagaaggcaagcgtggcggccatcgtcttctggacaccggcagagaccaatcctgaaggacggatcacgccggcgtctctggatttcgacaagattatggtgaaagaacatcccaattgcacccatggccttgccgtgtcgattaaagatgctccgggcaacgtctcgtggcaaaacgttaacgactgggtggcggattttcaaagaggaacagatttcaatcctgtcgataaggatgagtacgtaaacattgccactggtttcgatgcgaccggcaacataaacaggatactcggttaccagaacacgaaagtgctgtgggcgtataacggatattgcaagacaaacggcaaaaccgatgccttggtcaatcctgctgaggtcctgaaaacatttatcgcaaataatccagccccggcaaacagcaccggatggttcttgccgtcggtaaaggaactgcacatgctatgttataaggatgtcgataatattgcgtacacacgggacaacacagagacgagggatatagtcgaagtctccatctccgccgttggcggtgacgcattgtcaccgcgcaataaccataaacgtttctggtcttcttcggagagccccagtaataagaatggcgcttttagcgtgtatttctacaatgccttcgcacagctcagcgaaaaggacggcgcactcaatgtgcgtgccgtgtgcgctttctaaccacataaaacaaagaaaaataacgatgtgaaaggaacaggatattccggacgatggatgcgcatcagcggctggtagccgatgttgatgctcgcgggcgggctactcgtctcttgcggcaagatggaaacgggagaatctactacacgtttacccgatggcaagtacccattgcgactgacagcggaggtggcgcaaccgcacccccgtgccggcggcaaggagataggagtgatgctggatggcatgctcagcctccaaaggtacgtaatggacgcctcgggcaatactgtcccaaaggatgctgaaaacaccatttaccggaagagcactaccgagacatgtgtcacggcacggactccgaatgccgatatcgaccaaagtggcgggtatgccggcttcggccttctatacgtcaccgtagtgggaggttatgaccaagccgtcagcctccgtttcaaccaccgcatggcaaaagtagagttcacgctcatggcgggcgaaggtgtcacggaggaaaaacgaatgaaatagacgtggtgcagacggtgccgggcaacacctggattgatggcggcgaggagaatgtggcggtagccaaaacaatacactacactgccgatgaagtgaaggctggggactacatctattcgggcaggagcacttcggacggcggactgcgcaaacgctatcccaatgggaaagctcaggtcatcgcagacccgaagccgcaatccgtagcgggcaagacggtcgccggtgtcgtcttctgtataccgaaagacactgaccccacaggcagactaaccccagcccgacttactgatgataagattatgatgaaagattttccgaatgccgaaatttggaattatatagtcaacccatccctcgtcgctgccggcggtccgacgccaatttataccacctcttactggtcgtctacggaggcatattatagccctaacaatgcatatgccatacactttccagatgccactctggaaagtaatgataagtacttataaagttaggtttctggccgtgtgcgctttttaatcacattaaagaaagaaactgtagcaaagcattctacattcgattccggcggcggtgctcctatcgcttgccgcctgtacgcaagaagagctcccgggcaaccaagacaaggcgcagcaacttactttctccgttaccgatggtggatatacgtcggctgttcgcaaaaccacccgtactgtggagaatggctgccaaaccaagttttccgaaggcggggcctgcggcctatacgtggtgcggggcactcaaacagtctattccaacgtgaaactgacagccgagagggatgccgacacgggcggtctcgtatggaaaactgaaagtccgacaccgctcacaggcgggctgttggacgaacactattatttctactatccctatcaggcacgagcctcaatactggggcagggcggctgttcgccttcatcattacggtgaacgagttaaccgtgcccggcttgtcggtgcggagcgaaacatacaccatctccgacaataagacctgccatatcctggagtctgtctgcccgtgatgttatcctctcatcgaattcctgtactcactcgggctcattccatagtacttcctgaacacctccctgaaatatctgacatcggagaaccccgagtcatccgagatttccgttatcgaacagtctttttccctgagcagttgtgccgcatattgcagccgcatggagcggatatagtcagccggggcatggccggtgagcgccttcaacttgttgaaaaatccggtgcggctcatgttctgcatgccacagagcatgtccacacagaaaccggggttgtcgatattcttcatgacgcattcccttacggaggccatgaatttccagtcccgggtattgtggcagtccggcggaacctgtccgactccgtcctcaagaccggcgtatgcccgtttgagcagtgcccggtttgccagtatgttcctgatattcgccctgagcacgtttatgctaaacggtttggtgatataggcgtcagctccgttttccagcccctccagcatgtccttctcatctcccaaggcggtcagcagcatgaccgggatatgggatgtctcaatatcggatttgacggacgcgcaaagttcgtcccctcccatttcaggcatcataacgtccgaaagtatcaggtccggattgtattctctcgccacaagcagcgcgtcccgtccgttggaacaggtttggaccaggtattcctctttcagcagcccctcaaggtaggtccgcaaatcgtcattgtcctccacaataagaatacgctgccggtccccgccggtcattgttggaaggatctcacgcatggggccgcaatccggtcccatgcgggtttccccggtatcctgtttcctgggcgaagcaacggggcatgccttgtcaaggcgtctgctcctcaggggaaaaataacacataccatggtccccttcccctcggtactggtaacgcggaccctgcctccgtgcagccttaccagcctatgtaccatcatcagtccgacaccgtttcccgccacttgcagattgacggcattactgcccctgaaatggttcctgaacagtttcttccgttcctcaggtggaatgccaatccccgtgtcttccacttccacaccccatacatgccggtccgcgaaggcacggacctggatactcccgccccgtggagtgtacttcagtgcgttggacagtatattcttcaatatagagtccattttgtccttgtcaaaccggacattcaggtaagggaagccgctctcacgggtgatatcgatgtccctgatggaggcatatgtgcggaatgcctcacaggtcgtctccagataactgttgagctcatattccgagacatgaagtctcaaggtgtagttgtccgtactctcgaaatctatcaggctggtgaccaatcccagaagtccgtccacgcttttcagggccatccgtacattgtccatcccctccgccttcaccatgtctttctccaccacctcttccagcggagccttgatcagcgtaagcggagtacggacatcatgggcagtatgtatgaagaagcacgtcttttcgtctgatatccttttctgcctgcgcaacatggcaacgcgaaaagacaccaccccagccaacacacacaatgacgcatatccggcaatggcccatgtacccgcccacagcggccgggcgacactcagaccgaggcttctttcctcatacaccttgtatttctcctcattggagacggcacggatacgcagggtgtagttgcctgggggcaggctcgtgaactgtatccgcccgctctggaccggatggctccagccctcgtagagcccctccaatttccatgaatataggatgttcgagggatagtcgtagttgatggagacagcttccagggagaaggtattctggtcatatgcaagttccagcctgacggtattgtcaatatcctccctcaagggggatcccttgtccccgggatagacggggcggtaggagatcatgaaatcccgcaggagcatccgagaaaaatgcggggcgggtatcctcatgtcggaggggaacatgacggctccggtgttactcccgaacacgaagctttccccgtgccggaaagtggataccccggcattgaggcatacgcttgccagcccttgttctgccgtccagtttctgaaagtgccgctctcacgccggaacagggccacgctgttttcggtccccagtagcagggtgccgtccgcacgggggacaatggtatggatgttattggatatcagggcgcagttctcggtctggtattggcggacgaacctgtcctccacgctgtcatagacgagaagtcccgccccgccggtgccgatatacaggagcccgtccggtgcctggtacagtgcatagacatgaaccgcctcgactggaaaggcgatatgtctgcaggtccccccgtgcccgtcaagcaggtacaaccccatgccggtaccgatccacatccattccggagccttctccagtatggcggtgatggggcccgggaccgggtacaggcgtactgtgccgtcatggggatcgaaacgtttgagattgtggcagccccctgtccatatacatcctccggaatcttttccgatgtcattgatatactggtctggacgcccctctgctgcaaaggaggggggaaagtattccaccctcccggttttcttttcgatcctgtacaggcccgaagcgtacccgccggcgcagatgacacccggcgagacctcgcagagcgtcaggaagatatggttcccgccatcctgtatcccatcggaccggctgagaaaggagcgccaccgtcctaccgcaggctgcagcaggctgatcccgttgctggtggcgaaccacaagtcgccttcgctgtcttcgatgacatcatgcacctgatcgttaaccagcgaccggctgttgcccggtgagtgccggaaccattcatagctctggtagcggttattccggattgtgactccggcggggtagttggcaagccagatacggtccccgccatccacataaatgtcattgatattgtctccgttcatgccgttgtggctggcgtagtcggcggttatatagggtttgggcactagcgagtccatatccatcctgtatacccccttccgcccgtggctatcagcagctcccggtcattgagaggggtgatccggttgacggccacattccgcagcgtactgcctgcggacactccgtatacaagtatgcccttcctgaaggttcccacgaacagtttcttcgaaccggggtggtagtagagttcgctgaccggcgtccggatgctgtccgtgtccgcaagcgcctcaaggacaccgtccctttcccgtaccggaaaaagtccgttcacggtaccgatgaaaaggtttgtaccgtccgtctcgctgatagcggttatatcacctcttaaacgggagaccagccgctgcgcaatgcctgtgcgggtgtcatagcggatgatatggtcaccctgacagagccatatgcggtccccacggtccatataggcgtaacagagcatgcccgtggcgaagtcatcctgaagaccgggtatcctgtataccatccggaaacggtcatggagggtgtcgtaatggaaaatacggcctttccttcccacaacccacagcgtgttctccgtgtcggtgtagagccagttcagattgacttgcggggccaccttcagattgccgtcaagaacagtgtaatgcctgatccgcttgccgtcataacggtccatcccctcctgggtgaggaaccacatgtatcccctcccgtctttttggatacggtaaatcctccggttactcaatccgtcctctattcccaagtatttatatatctgggctccgcacatggaggaaattcccagcatgaggaatgcggacagtattcttcccatattccgaacacgtgtcattctgatgtaaattagacaacaactgttgcaaatatataaaaatataaattaatatacaaatttaaacataacctcggatgtcggcatcaggcggtatgtcctcaatgtcatgtaccccggaaaatagctgcatacgggaccggcccatgatatgaacatattccgagaggcggttgttcaattgacccgacggaattatggcttgccgggctcgggactgtccgcaagggtacgttggtccggtgtgcggaataccatccatacctccggtccgaatttatatccgcgggtggtacaggtgccggtcgaggtttggcagcccccaataaagcgggccgaattgtttgtaagcactcttaccctcatgcccgatttatagataatcttccaacagtaagaagttataattcgcatttaagaacaatggcgggcatttcttgttaatattataatcatataaaagaggcgcatccgttagtgccagatttgttcaccactttcatcgttgcgtatcgtattgcgagttgtccgtatcagatgtttatcccctctttcttaagacttcctgagaactgcctgggaaaggacggctttccgcattgcgacttcatccacagcccttggcggtatagccatgcctttcacggggactacggttgattcatgcgacacagcagattccggtgctataacagggttgcctacatacttgtgcctcttttcagcttgctgtccagatccgagttgcgcactttacccgcaggttggacggttgtacataacaatattgatctttttgggggctaaaagtcgaatatccccttaaagtaagcgcctgagtaagtacatcttctacagttcattttccctccttacttttgctgcaaaaaaaataatatcctatgatgcagcgacgtaaacacatgatgagcagagaaaaatttatctccgttcttttccgtcagcagcagagtggtttgtccattgctgatttttgtgagaatgaaggttatagccgtagtagattctatctttggaaacaaaaatacggtataacggagcgggagttattggcagaagcctcccgcttaggggttaaagacagctttgtccccatagtaatcaatggcgacacgccatcccccggtatatctcacgaggctcccctgccatctccccagcctagcgtcccctttcccttgaaaggaaaggacagctctgaaatatccttggaattacccaacggattgaagttgaagtttaaagggtcttccggctgtgaagctgccctgaatctgatctctaaaatatataatgccaatgttctgcctaaatgacagcatgagatatttcctgtgccccggttatacggacatgaggaaaggtatgttcactctttgcggccttgtgcatgagaggatgggaggcgacatcagaagtggggaggtattcattttctacaaccgtttccggaccaagataaaattgctccatgccgaaccgggcggtctggtcctttatgagaaactgcttgaagaaggcaccttcaagatacccgcctataatcctgccacccgttcttaccccatgacctggagtgacctggtcgttatggtggaaggcatcaatgaagatgtcagcaaaggcaggcaaagacggctttccaatttgaaaaagcattggtaaaacagttgtaaacaaacagcttgaaggcttgtttttcttgttgtttttgactatctttatatcatcaaaaaaaagatattgaatggcaaaagaagatgcaaccggacaagctgtggaaccctcaatggagcagctgctggatatcaaccgtaaacagagtgagatcatctcagcccaggcaaggaccatagaagaactccggggtacgatagttgagttgaacgcctccctggcatggctgaagaggaaggtgttcggaaagatgagtgagaaatgcaagcctgtcgataacggagacccgaagctcccttttgactatggcgacctggaacagatagaggcggaaatcgaagatgcccggagcagggcggctgaacagattaccgtccccaagtcccgggccgccaataaaacgccgcgccgtaaccgggtcgtcatggataaccttccggttgtaacagtcgtcatcgaaccggagaatgtcgatttaagcagatacgtcaagataggcgaggaacataccaggacccttgagatgaaacccggctacctctatgtgaaagacacggtacgtcccacatacgccctgaaaaatgaaatggaggccgttgataacggagaaaaggctgtaataaccgctcccatgccactgatgcccatatataaaggtatgccaggggcttccatgctcgctgaggtccttttacagaaatacgaatatcatgtcccgttctaccgacaagtgaaacagctggaacatctgggtgtgaaactgtccaaaaacacattggacggctggttcagaccggtctgcgagcttctcaggccactttatctggaactcaggaagaaagtactggccgcagattacttccaggttgacgagaccacgcttccggttataaaccacgacaggcataaagccgtaaaagaatacatctggatagtccgagcggctgtgccgcgtctgccttcttccattacgacaacggatcgcgttcacaaaaagttgcggtcaggcttttgaaaaacttcaaaggatatctccaaagtgacggccatcccatttatgacgcctttgaggatggggaggacgtatgtctgtgtgggtgtctcgcgcatatccgcagacatatagagctgtgcaaggaagaaaatctggaatatgccatgcagggactcaaatttatccaggatatgtataatgtggaataacatggcggataaacaggaactcccgtatgaaggacgtgctgaattacgccaacgtctatccaagccgatgcttgacagctttgaactctggcttaaaaacacataccctaaagttctaaaacgaagtcttatgggaaaagccatagcctatgcctactccctgctgccaagaatgaaaccgtatctccatgacggaagaattttcattgacaacaatcgctgtgagaatgccctgaggccactggtcatatcaagaaagaacatgctgttctgcggaaaccacgaagcggctgagaatacggctataatctgttccttgcttggctcatgtaaggaacgtggtgtcaaccccagagagtggctgaatgatgtgatcagtaaactcccctattatctggctcccaaatcagacagagacctgaaggaactgctaccggatgtatggagaaaataatcaggacagttccgggaaaatgcaggaaaaaacgggaaaaagcgagactgacactcaatgacaaccctgagataagttggtatatggaaattgagatgcacttacaatggagtgcatcccactgaaaaattgaatgcacaagatgtagttgagcagtcgcttaccccttaaaaacaaggagctgacgcatgtgtacagccccttattttttgtatagcccggcctcctctggcatattgccgttgcttccatctgtaacaagcaaaatcagaatctatatgcggaactttttgttcccgtagctgagaaagtccttcgtggcatatttcacactgaatggtccgtagtcaccgagagccgaatgcgcaatttgcttgtccggttctgtcacatgctcgacaggttctcccgtagtatcagtatccttgtatgacataggctgcatgctggcgatggctgacccggtagccgccgcacgcaatttcctgaacgcattggagaggattccgtccatcattgaccagtacaaggcgaagaacgaggtgcaggaaaaggaggtctcacagttgtaggagatagccgggaaggtatggaagaaggaggacgaactgaaacagttgaagtccgaacttgcagcactcgaccgaaagatacagttggagcttgagccgcctacgcccgaagtcgccgaaaaggagaatgacggacaggaggtcaaaccggatgcggaaggtgtacgaaacgtatctccacaacacaccgaagatgtgccgcagatacgcagctcggtgaatgaacgcagtccgtctggcaattttattgccgaccacatcatcatcgggcggccgggattcaacgtccgtgacgagtgcaaaccgaaaggtataaaaatgtgaacgagtgtgcggatatatatggcaggattgggaacataccattccttttcctgctttttccatcaatatgacataatggcaaggataccatacaacaagccctcgattatatcaaaatagggtgttgaaagtaaatcgtcatggcaaatccgccatatattcagtattttcgctaattttgcattcaaaatagttaggcataataaaatggaaccatctatatacagttattcactttgtattgcgctaccgttgatgttgttcttcggcttttattttttgttggctccaacctcggaaaaagccattttcaataattatctgcgttcccggcgaattatgggggtagccatactgttacttgccgccaactattcggtacatttcttttttggaatcaggttcaagaataccgatgccgccatcctgatgaacctgtccacctattttttgtgctactggttgttcagttcggccctcaccactctgcttgaccgcttttatatcaccaaacgtcggttacggacgcatatctgtctatggatactgttttccatcctttccggcatcgttctgctgttgttaccaaaaggtggtttacagacaacggtgatgtttgccttggccgcatggttggttatctatgggctgttcttgacccgtaggcttctccgggcctatcacagggtcatccgcattttcgatgacacccgtgcggacgacatcggtgcctatatcaaatggctttccattttcacctactgggctgtcacattcggggtgggatgcggactgctgacattcctgcctgatgaatacgtctatatctggattctgtcatcggtaccgttttacatttatctcttcctttgctatctgaactatctgctgttttacgaacaggtggaaaacgcgatggaagatggcatgacttctgaagaggaagacctgtgtgacaccacaaaccgggaacaggcacagaggcaggatactccttttttccatgccgaaatagcgaaaaaaatcaaaggttgtatcgatgcggacggttatatccggcccggccttaccataaaggagctttcagatgtgcttcataccaaccgtacctacctgtccgggtacatcaaaactacgtatgacatgtcgttccgcgattggattatcggacttcgtatagaatatgcgaaacgtctgcttgcgcgatatccgaggttgacggttgccgacatctccgagaaatccggttttttgtcaccaagccattttataaggctgttcaaggaaaatgcgggctgtacccctaaatggaggaaaacagaggcggaataatacggtgtgttatggatggaggaatagcccaaacgacaaaaaatagcctaaactacaaaactaaaatgttctaaaccacaaagatgtgcgattctgacaattgagacaatttttataggcaagaatcgggctgaatttaaatcttttcgcttattttgcacttgtcggttgagcctgcgtcatctccaaaaagagtaaaacagggttttatgggtgattttaacgtgtgtaaaagaaaatgctacccaaataacttcaaataaagacaactctatttcaagcggcaaatgagttctacagcttgaatttgaataatacaaacaataggattctcctttaaaaagtcatgaaaaagattcatttacttcattacttattgttgtgctacatggttcttgcggtagctacatcgtgcggcgatgacgaggatgactacgcccccgacaatgtaaatgatcccgagaaactaactgatcctttgcctactaccgaccagttaggcgtaacacacaacaacacgctttattacctttcgttctggagcaaagaagaccatatgatatccgagaacatgataaaccgttacaaggaggcggttccttatgctccgggaaagaagatggaggttggcgacgcgttcttctttacccggcaggacattgaccggattcagtcggataccgatttgctggctgacatcaaggatatgttccataagcggagcatcgtgatgatgatggagggaggaacgaacgaggattttaataccgtctgcacgttgctggattgctataatccttatgcgaaggaagatgagtcttattcggacgaactgccgctgtgggtattttctggaccgcttccgtcggcgagcggattctattccaagctcaatgcgctcagtactgctaccggagctgatggcaaagaatctgtacagacgattaatgaatacgggcagggatttcattgcgacatgacaagtcaaagtttacaaagagccctggaaccgaaagctccgtcaaacggttcgtcggatttgaaaaacttgatatctgcctatatcgttatcggtcaaaatagctataccgcacctcctgttcatggacatgaaggtaaagggacaaccgataattttcaagtagaagctaagatatggaccgcttatagcaaagaccggaaagaacatttttatttggtaaatctgggttttatagcctatgtagaaccttctttttatggagaatggcataccaaggtcagtactctgaaaatgaaagggtatggcttttgcctgactgacgtaaatttggaattcgctccggttcacccgaatggtgccattattcatgcacattccccgcaaactacggaacgccagagctcttataccagcagtgtctctttcgagttaggaggaagtgtcagtgtcactggaccagagatttcaggaggaataagcatttccaatagccatacggaaacaataaatgatattgaagttatcaatagaaccaatccggcccaaggaagcccacagcttaggtggtagtttaatttacgcgaaccttcttcacattttaatatgttttgttacgcgtcgagtgctgtcaatggaggtgctaaggccgggataaccacttgtagcttgtccacagattttattatttctgtacctgatggagctgacaacgaatggaaagtaagcatgtatccaacactgaaaacatatttctttagtgacctttttggattccatgatcaatatgaaacgctatttgatgatgcggcagaaagctggattggcatcgaaaaagtttttaacttgccgactgtcgatctgaaagatgaatgatttgttacgttgatattaataatttctaaagttattggattatgagaaaaacattcttggtgatgagcaggcttatcgatttatttgtggatatcttgcctatagatgagcttgggtttaaacatgtcaaacttcaatcagaagggagaccaccgtataatcctgcaacattactaaaattgtatttatatggttataagcactcaataagatcatcaagaaagttggaacacttcctgtaaagtaaatgtggaattatggtggctattaggaggcttaatgccctcttttcggacaattgcttatttaaaaaaaaataatgcggaggcttttagaaaagtctttaggcagtttgtccttatgctaaaggatatgggtctgatagaaggcgaaaccataggtatagattctttcaagatatttgcccaaaatagtctcagaaacaattatacacaaaagaagatagacagacatcttgaatatatagataaccgtattgaagaatttgaagtagctttagataagactgataaagaagaagaaaaagaacttcttaaatctaagattaaattacaacaagacaggcgtaagaaatacgaaactcttgatacggaattgaagaatagtaatgatactcaaataagtctaacagacaaagattcaagagcattaatgttaaccaataatgtatcaggggttgaatatgcggttcaagcagcctttgatagtaaacacaaattattggttcactctcatattggagcatcaactgataaaagagaactatcaacagcggcattgaccgtccaggaactactacaattagattcgttcaacacacttagcgatgccggttatactagcggcgaccaactacaagcctgtaaatattcaggaatatgtacttattcatcgcctatgccatcaacatcacctaattcgaattccataccactggctgaatttcattatataaatgacggagattattatatctgcccttgtggagaacaaatgacaacaacagggaaatggagaatccgtcccaattatagatcaaaagtatataaaacatcagcttgtgtaaattgctcaataagagaaaaatgtactcaaaatcaaaatggcagagtaatagaaagaagtgaatatcaagatgtaatagatgaaaataacgccagagttatgaatcatctgttgcaagggcgcgcagcagacattcgtaatgtcgcacaacttccgcctcttcaccgccctgacgggaactgccacagccccccaaaaacagtccaaacaaaaagactaaaacagttgatcgtttcatggtgctgtttgtttaatggttaaattactggtcatgcacacaacggacactaccgcccagcagataatgataaccataatattcattaaaccctgcaggtaacccggccggactatgaatgtcattaccggcaccatgcattaaggcccatctattacgattaaccctatatgtgggcgctgtttttccagctccgatatcaggattccaatatattcctgtatgtaatacagaggcaggagaatgtcgttgaggtgatgaatatatcattggagtttgtgtccagatagctaaaacgccttcttcatatccaccatcgggggcagatatggctggaaaagacttagctattcccgcaccgctttctatcaatcgagtaaatacaacaggataagagcctgttatagactgtatcagattaataacctcccaagccgtagggagtcgccagccatcggggcaggcacgttggggaatactgccataataaatgggtccgaccatagctggtgccaaagaatatgaacgaggacgagcagccatattaggacctccttccctactggcgtctatcatccaacaaacaccaccattacccatacgggtagtctgatagttactgccaccgatacgcataagtttcatggaatttccgaaaccacaagccggttgctggcttacatgcaaacgatattccaattcgttagcagaatttcctgttcgtatggaaaggacagcactacgcatattctgggtaaagttcttactgtttgccgaaatagtaaccgtggctggtactcccgctgtacccgaggtttggctgagtgaaatccatgaaggttttccggttatttgccaattggtattctctgtagttatatttacgggtaatgaagcgacacctatttggatatcaccgtcaaaagcgaacacccgtttgtccaccgtcagccgtttgttccctcgtactattacttcttcttgtacctcgttccacggcacgatacggcatttaagggtatggtttcctttgaaagcttcctcgggagtttgggccggcaacccgtccacactttccacttgtactttatattcatgattacgcagaatatccatcggcactcccgaaccgtagtccttgaagtcgaggcggtagtaaccgtctaccgacggcttagagccggtgagatacggcttcacgtgcataaccagacaaaggtcgtccagcgcattcccgcccgaggggcggttcttgttgtccacctcgcacaggtagaacgtcttttgtgagccgttgaaaataccgatattcccgggtgacacatcgctgttcaatgaggtgaatgtaccccgtgtctgccgtgccccgacgggtacggtgggagtattcacttgcttgcccgtcacattatagttgtccggtgcaatgcgtccttttgcccggtaattgtacagccgcagatcgttgtaataatagaaaaagccttttaggtcggattcaagaggattgataagcgtgaacttagctaccgcacgtatcatcgtcacctcttggggagcgccagagggagagaaaccttcgcccaccgcttggttgggaagctcgccccacatgggtatgccattcgtaaagtcgggtgcggcatccgttccgacatcgaatgccaggcggttcattaccccctctttctgttctccgaatgcagcagcaagggtattcacctgctcacggacattggcaagcaccacgagtgtctgatgttcgggagctcccatcagctgtacacgtacggtttgtgtgccgatatcgtatgtaccctgtgcacggtagaagaatgtacctttctttatattcgtaggatctgcaggatcaaccttgaatgaaagtacatctacagtattgattccattttcatctatagcacgtgtcagcggcgcacgcgtttcggaactttgcgaggtgttcatttcagcagcctgttttgaagcaccggttttaaagttcaggtaaataacggctgtatgtccgttcgcttgcggcaccgactgctccgcatcatcactgcaagcggtcggaaggagcgccgccattgcaatccacagcacagctgaggcatgtcgcctccacagatatgccacacgggtgaaaccggataaaccggaagtctgaaatcctatattcatttttcttctttttttagtaatatatctattttttatatcaactttcttacaaactaaattgcatcggtcatataccgtcttacttatttatcggcgaacagacgaacggaaaacccgtggtgtttaacgtctctgtagttcgcgaacgcagagtacgagtagaaagacacgttccaagcattgccgaggaggctgggaaactccgtgctcgaccaataccgaccatattcgcctcgggcttcgagcaaaccactcgaaatgaacgttgggaaggagatataaccggcagccggaaaaatacgaacgacagcctcggaagtatggctatcccaccaagaatcattattgatagtgctaatgtttcctgtaaatgcgctgcccaagtaaacacaatccactttcaatagggaagtaaagtcatggttggcaaacgaacccacgcgggtgtaacggtaagcacaaaccatattattatcagtagcaagagggaaatcggatagggaagaatcatcgataggattaccggtaccttgtttgaaacgcagagcgtaacaaacaccgttacccgaagagaaataatcgttggcgaaagtttttttgatgccaccgaactcaatagcctcgttgacattagaagtattagtaggggaatcatattgggtattaccgctgtaggagaaaacgcccgtcaactcccagcgggaaggcaggtggtaaccataaccgggatgccccagtttaaaaaagacatcatcaaagagcttcttggcatttggattgtaagtatcattattctctcctgtgagcacgtaccaattataataaccggattggtcattgctatggctcgaagcccaatgaagattagggtcagtctgggctgcagtgggagaaatacccggaggaacggaagaaatgaaaggagaattatagatagagccaccggcgaggttatattcggcaacataatccaaaggcgtaccgatctgcttaatattgattttagtataaagtcgtccagcccgtatctacagataaccatccttgaatcccttgccattcgtgatggcctgcaattcctccgtaaccggattggtgagagtggcgccagccgccccactgttttgactgggtttcagccatgaattagaaactgaaattgttgttccgtcggcattataggcaccgaccttccacccactggggtaattggtgcgcacagaaaatttgttctgtgtgcttgtggcatcgtgcttgccttgaagtgtcatcgccgttcgggtcactgccaagaaatgccccgattcattgaacgttatatctgtgaatgcgtctatcacgatgggcactactacgatgttatggttggtaaagttgtccgggctggttacagcctcgttcaaagtggcaaaccccggccctttcacttccttgatggtgaaaatatagcggtggttgcgcagaatgggcatgtatttacccttttcgtaaggactcgtgccaccgcccttgataccgtcccatgtataatccattcagtagtagtattctcttccttgataggcaagatttataactatacaaggacggctgccgccggagatagccgactgttcattcaaataataagtgatgacattcggagatgcggtgtttgcagttccctcaagcgggtgcccgccactgactgctggctgcgatgtggcaggcagtgtgggagtcatgtatcccgactgtgaagcggtggtattgtatgtagcaagatctacccaaacgcgtccgttgcctacggaattgacgaagtaaacctttcccgcagctgtcgtggctcccgaagttgtaggattgatgatatccaccttcgccagcatgcggataagcggtatttcctgcgcaatggtttgcgacacaccggctttcagttcaaagcctcccgccggggcatgctcgccgtacatgggtatgtatgtgcccgtaccttcttgtccgaacctacccacgacttccacttgcttaagagcatcataggtggaaccggctgttatatttgccagttctgtttgggcattagctatgagagctatacgtttgtatctgcccgcaataacgggcacagagaagtatttcgtatccgaagagcctgaaagtgtatgcaacgagctgcccagaatatcatatttcaccttgactttctccgtaccgccttcatcggcaaacatcagtacggtaatctctgttatccctttctcgtctacaccacgagtattcgccgcccggaaatcgggaatcctgacagaaagtgtcacttcggccgtctcacctttgccggacacgggcggaacaggaagaatgagttcgtcttgccggcacgaaagtacgagcggcagtaataacaggaccgacagcaggttgcggaacggtatgatgattgaactacttggcataatatattgttttatgatttgcatttcatgattgaccggtgcgttttttacactcctccgggttttacattctgattttcccaattcctgatcgttattttcgcatgaccgtttgtaaaggtaatctcgataggaatggttacttcaatatcttcctccatcggtatgtggtagcgggcaataagccctgccaacgaaatcgggggcacgatatggtttcccgtggtgggatcgataatttccaccatgccgggggtatcggccttgaaacgggggatgtcagtcgtggcattagcatggcggttggtgacatcatatgctacggcaggctggaatgtcttgttccggcttacggactggagacgccatgtgcccgaggtttcgtcgaacaccggtcgcaaggctgactccatgcccgtgatgtgtaccacaggctgcacgctcacaccatcaaggtgaagacttacacggatagtgccggggctgaaattgacagtatggtctccagtctcgtgctcactgaccgtaagtggcgtgacagcgaaaagaagccgatcaagcgtggggatggaagcggaagtctccgcatgcgggtgtgaggcggaaaggttccttatggtttctccttcggaaaagccgccgagcttggtctgtgcatccgaagcattcgcccagagcacgacagtgtagtttccctgcggcagatacatctcaacaccctgcaaacggtcaagttcactcttctccagcgtctgcatatgctcaatactgccatcgggacggtacacacacagcctcaccctctgaacacgctctccgaaaaggtcagcggcagagccgcgaggcttgtaggtaaatcgtaacagggtatccagagggcagccctccagggactccctgatgcacctcgacaagactaaggttaaaataccggaaagcatcaggaagcgtatagctttatacaatttcatgcgtagtatcttttaggtgaataactgtggttatgactttatatgaatatacgtgttatgatttaacaggttatagaaatacaggtcgtgaggtcagggcaaaagacacccacgacctgcttacattccgccgtgcgagaggaactggtgaactagtaaaatgagctaaaaatctcctctacgcaaacggacttgtaaaagaaacaaacaaatacaatataccttgatggtatgacagttagagattaggcttgacaggaacgaccgtccaggcttttaccgtcaccttcaaccaaacgctgacagcactggtattaggtattgtggaaaggttgctctcgtcaaatgtaaagtcggctttcgagatagtataaatctttcctttttccagttctacaatattgccactgccatctttgaatcctctcacggtgataaactggtcacctgtgccgaaattcacgctgctgccggccttagcagccaaattactcaacttaaatacgagctggagttgctcgttcgcgtcagtactgttaccgttaggaacaacctgatatgcccaacgttgccctgcagttggcggaatgacttcctttgggatacctgtagcagcgacggcagactggtcaaagagttttccagcgttagcaggggtgtaaagcccctgtccttgagcataggcagcaggagtagcaccatattgtactttcgttcccacaacggtaccggccaggttgaacttttcaaagaagttattcacatagattccttccagcgtaaaaccatccaccgcactggaggccgtagccgccagaccttcgatttcgacacgtgccacggcaggaccgatttccacttcggcatacttgtcaccgtccgttattccaggggcataaggcagggccggactaccggtagtccatgtctgcaggggtttgtcatcgccgctcaacaccacatccgcaactgcagactggcttgtgatttccagttgtacagctttcaatgcagctacggttccacctgtaggcaatgaagttccggcaggaatattaccacataccgttacagtggtagccgccgcgggtacatccgttatttgggtaccggtagtcagattcgcaatcgtgatgggagtggttgtagtcgcgttcacatatttcagaatgctggtcccgtcatggaagtatacatgcagattacttaccgtagcaaccgttcccgaggctacaggaggctcggtcgatctcgtcagcgtcggcaactccagcttcatgaatacgcttctcgcttccccgttctttacgtcaggcacttcgatgtcatcgttactgcacgcggtgaatgctgcagccatagcaaccattgtaaacacgcttaacaaactttttttcataatcattgtaattaaattgttaataaaaaaataaacactaataaaacacttgttaatatttaattcgtacttatactttttttcctgttttgttctttctactttttactatttcccttccgctatcctgtccagttccatacggagcccgaagaacttgggaatgaggtccgacagttccggatccaggggaatacgcaggacaagattgggattcatgcggcaggccgcaagcatatgttccactgctaagtaatcatcgccctgccgggcgcttaccacagcatgcaggtattccttgcgggaatctacgggtaactggtctaaaagagcggaagcctctttatgataaccgagctgtgtcaggcaaagggcggtgttatagtcaggccgtttttccaatatcggcaaggcttgccggtattgtcgctctgaaaggagccgcaaggcttcggcatactcttctccctgcggagtatatacgggaccgcttgccgcaagagagtctgtctccgcagaagctatgacatattggtccagagcggaacggtcaaccaggtcgctaagcgaggccacaatgaagagcagcgtgtccgaggcggcaggccgccatgtgctgcggtcggtggcttccacgatagactctagccgcacacggagctttttcattccatcggtgacgggcagagaatatacatagttgtagatataatcatgtccggaaactgaatccgaattctggcggaccatcacggagtcgatataggggaagggaatcatacgccggcggatttcatcacggttacggtcattcatctcattttcggcaatccggtcgtagaaataacggtggcgggagatgtccatcgaatcggtggcggtgaggacatagttgtgtatgttggacaggctgcgcccccccgttataaaggtcacggaatttcgaaggtacacgatcggcggtaagctcgcgttccagccggtacatcggccaaaaggaggccgtacgatgatatttacggtcataggaggcccacaacccgagcgtgtcacgaccagccacatagcgccgtacgctttcttcgatccgcttgcgttccaggcggtgacggagtgtcgcacggttggcctgcgtacgcgtgttccagaaattctggcgttcaagggcaaggcgtttccacttctcgtaggcaagctgacggtcgcgctccttgccgtaaagttcatagaagaacctctgccggcaggcgatatccttattgatgcctttacggtcaagatacacactatcataagccgaaggatcgacaattccattaagaaacagcctgtacgccttatagtccgcttcctgcatgcgggtaaaggaagaaccggaaagcacaacaggtggtagcgggaagcctgaactgtcagaggtgcagagcatcggggtgagtgtgacacgccagcaactgtcaatcaggagggaagggacatggatattgaattccaaacgcacggaaccttcccgcatggtgacctgcttgacgaccgtgcgtgcagcgacgatgtcaacaccgcccaggtgtatggttttccatacgtcatccgtactgtcggagacctcttcgaactcaccgggaagagtgtccgaagaagtggtgaaccccacctgttcggcaagcactccggaaggtgcgctctcctcgtggggaagaaaaatattaggacggccggactgcataaacagccgcatagtccgcggttcgcgggaagtggaacaggacacggccagtaacactcccgcgcagaaagcggcggccgttatgtgggatttgagatacttattcatcattcaactttttatatcttgtttcaacagataagatggtttcagaaaagataaaccagattaacggcggtacgtgtgggtgtcacatagacaccggagcccttgccggtacgcttaccgcagttcacgcaacggtaacgttcccagtcggcccagacaacaccgagacccagttcgaactccagattccagcgacgcgaaagggggcgcaccagccccgcagaaagcccgccgccgaaagctgtgccttcgtaacggtagcgatgtccgaacagaccacccgcattatatatggagaacacaccgtggagcccgataaaacaaccccttccgtaagtttcgcgcatccaataacgcacaccaggctggactgtgaagtttttaagcttgccgtcatcccaaagacggaaaggattgtactgtacgggaagatgggcggaccaatgcgtggaaaaagccatggaaccctccacattcagattccccgtacctaaccccaccagattggttctgacagaataaaactgcgcggaaaccttgtctgaatacacaaggcaggccaagacacaggcaaaacataaaaagtacttttttctattcaaattcataattcaaactaggataactcaaactttaagtggataaacaaaacatgcacccaaagtaaacggatgaaaagctgtgtcatcataataagactgttcttattctacgtgcaacctgtaaaaatgaagtattttaatgaacaagaaacagttttatattatcacatctgttttgtttttcctagttgcaaaagtaataacacataaatcacgagttacaaaatgaaaccacaaatctaacgtccgcattgcataaaacattataatacaaaaacataaagacttcgttcttcttatttttctaacacgacgctaacagatgatttacaaccttaaaaaatatagggcaatcaataagtttctgacaattgactggaatagtaacagatattataatgaaagcatcttcatactttccggacatacctcccaggagaattaaacctgttatggcttacctccatgacaaaaccattctacaattacatcattccggtattatggcaaaaacaatctgaacatattctagatttaattaccggatgatgcattagtcattggaacctagtataaagttgaaatacctatcccagaaggcttaagaataattctttattagctgtttccgtagatttaatacgtgatttgagccgtgacttgcgagcgtatacattagccaccgtatccttcatgaataagctaattacttgcggtgaaaatcctacaaaaatatagcataataacctggtgtcggaagctttcatagttggaaaatcttccttgagcttgtacatggcattgtcatgacaagtgtttacgattttttccagttcttgcagtatgccattgttttctgcaaaatctgtaattatctgctttacttcattaaatatgactgactgttgcgatgttgtattttcacgttcatagtaggtctttccaagtttatcgacaatgtcaaagcgtgaagcagccaatcctcttaaataactttccgtagtctgctgttttttcacgcgttcagtaagagccttgtactcggaattggctttctctgtcaataacaaataatggttggtacgatcacgttgcatgcgtaaacgttggcggacgatataccaggcaattccaataataaaaaaggtagcggctgctatagctatttcccagacagtccggtttttcattctgtattgggcgaattttgttcgctctttaaaatagtcccgctcgaccataccggcggagaattgcatgtttgagcgcattattgaatcgttcaagtagatatagcgatgtacattgtccgttgctttttcaaaatttttagcctgcacttcgatatggtatgcagtgtattgtagttctgccatgtcgcaaatatcagtagtgtgcgcctttgcaagctccagataataccgtgcactgtctatatgattcttcaaaagacttacatctgtcaatgtgtgatatccatataccgtatcctgtcgggcggaaagttcgattcgctgtaacaggtcattggatatatgccgtttggatatcacatatagtgatgcaagattagtaaggctgacttctatcagattactgttattatgttcatcggccaagtcaagagccgccgaatacagccttattgctttttctatatcttttgagtgaaaagtagcggctgccatgtcaagggttgcctttgtctcctcctggatatcacccgattggcggaaattatttctggcttcgtggaaataatgatatgcccggctgtagttcatttgtttataatatacttcaccgatctgtctgtataaaagccctttgtaataagattcatcggtatctgtcagtttcttttctattttgagaaaaagacgtaatgctcccggtttatcacctgtgcgtaatttaattcttccccaataatatagagttttacactggtgacgtaaatctttggggtaatgtttataatattgccaagcctggcggatcaatgaatcgtcagtaactttcatttgttttttttccaaagcttcggaatagagcaatgcatatctggcctgttcagcccggttgccttctggtttgagtttttgtagtattgctaatgcactatccgggttgttctgcattagcttttcagcctcactaaggcgaggggtctgttccctgttataacaacctgtaaaatagagaatagctgatagtccaattataattttatatttcatattgcgaatattaggagtaacaaacacatttcgatgcggaaagcttttattagaagaaatataattattattacattctttgtatctcaacagaaaccataaatactttttttgcatgattccctgcatgatagttctcaattcctatatataccatttccaaaaacagacaataaccaaaaagttataaaatatgcaggcttgggagtttagtattcttcatcttattatcaactttaattatgcgctgctttataccataatgtattttctttcagcacagtcataggattgtcactcggatcggatgttgttataccggaaaatgtattgataggaataatacctttggccatagtgtagaaattttttgtatgggttttatatggaacaagatgatttagctgctctctaaattggtttaataatataggatcgttacagagtgaggttatataatctgcaaaatcataaaatattacaggagtataaccatctaaacgttggattgttcccctcagggatttgtcaaaagaatatttactattgatactttttatgatggctgccatattctccagttctgaacagtccgttactgctaatgtcccacaaggcattatttcataggttgaataaaaattgtaaaattcttcacatcccgattgataatcgggattccccagtaaatattccccaatagcggcataaggcattccgtatgccatcatctcactggtagaaccaatcaaatattttgtaacatcctttaattcataggcaacctctatagatgacatataacagtcatcaaatagaatatattccattttcatgcctgcattagcaataccggaggctagagattttatatctgtttggtattcggcggtcagtcctccaaaataacgtgtcaatggaacaccctgatattcccaatgcattttcatgtgaggtgcggaacgcactttcatctcataaacaggaagccatcccataccgtgacatcctataatcatggtataaacagaagccggagcaaatgcctttacatcatttaaaattgctgttatcccatcgattgtcgtaaaaggcggagacttatattttttaagtatttcacgtttacatctcccgtgagaagacacaatttcaaacatcatggcctccgtactaccggtagaaataaaaacaattactttctcattgttcagccctattttcgttatacatttttccaggtcagatatgttattataaaaatagttcgtcaaatttgaggaccatggcaaatacatgaataatgttttccggttggcttctatcttttgattttcctccttctcgcatgaagaaaaaagtaaaattcctcccaataaaaagataatgctaacctttacgtagatttttttcgttgttttcatcctgcaaattgtccaataactcattattacttttttattatagccttccattgtaaaatctctattttatcttaaatgtgaattgtaaataaccatttcctgatattcatagaatcaaatcctcttataatcttacaatattatgactcattatctcacaatatattgaatattctaataaacagcatgaatttaatcgtttataacacgagatgattttcttttcaatgccctatggcagttctcattggagacactgccgaatggcacttgtttccgtttcattcttgcaaaaaaagatgaaacggtttaacaggaacaactgcctgttgaaacaataccggcaccaatgtcacaacaggcagttttatggttacttatggcagtccaaaccgattttcaaagccaaatcgctccggcttccacatcccctgacttataagtgtaaattataaactcttcaagcgcttctttccatgtaagattgaaggttcccataattgaatgtatggcacgattacttttttcatcaagcccgtcttcttccaccccttcggggttcgtgtcttcgtctacccccacagtctcttcacggctccagaacaccactaccggaatgtttaggttgatatcccatgtaccacgctggatcaatattccggaaggtttatagaacggatcaaaagtacctgtttccggattgcccttggatttgtagccgtgataaagacgaattttcaggtcgaattccttacggtctttcaaaaaacggataactcctttcaaacctatcgggttactgtctcctgttatttcagcttccttgctatgtttggtcttgtcccagggggtagtgtccacataaagataatccaccaatttctgcggttcattgtcatcggcttccggctgaccgtcaaatgtgggttttacattttcaggcgtgaagaaatgttgatgaatattatcctgcccgttttctataaactggctgttcatcaaatctcctttggcgttatagtaatagatgaacatcaaataaacgggagccggggtgtatttcccataagtatagtagtctccatttttctgcacgtagaacttgctttgactgccttcggcaagcctccaacccttgccggctttcagctcataagttatttcctgaatacgtttcatgtgcttggccggagattccggattctggtgaggtccaccgactttctgtatttcattccagtctgcatgcaggtgacattccacaagacggatagtcattttggaaggatcttcatgcaatttattatctgtctcattttcaggaattacaggatctttactgcatgaattgaacaacaacgaaagagctgttcctatcaggaacatcaatgcgattttacatacatttgttttcattttttatttatttggttaataataattgttataaatcaaaaactccagttcactacacaacgtacatcagatcccatgtcatgtgcatagtagcgtgaacggttagtgtattctttatattctttgttcaagatattgtctgccgctatcatgaattgtagtttgtatccgtattttacaggacactcaaagctagcagcgaaccccaagaggtggtatgccggaggggtatagggaataagatccgtattcgagtcaaaccgggtctgttttgccacgaatcgatgtctgatactcaaacgtaatttggaatgcgatttggtttcgtgaagccatgagaggtcatggctgaaacgggaagaggggatataaggaaggtaatttcctgtcgtctgttcatttgcccgtataaaagaagcaatcaggtgataatcccatgaatttatgggcatgaagtgaaagtcaaaatccattccgcgaaagaaagccggggtctgtttgtattggaatacagggtatacccccgaaataacagtgatggtttctttcttcggttcatcatagatatagccgcttatccattgcaggtaaccgtccattcgggcactgaataccttattgctgtaactgatggaagatatccatttatagctcctttcggagtgcatggtagaatctcctttgacaaacattccggatccgagttcatttccgttgctatataattcatacacgtgaggagctctccaggccagcccgaaattagtggtgagcttccattggtcagagaaatgatgatgacctcccagactgtatgatacgttattgaactttcttgttcctccatagagacttcctgtccagtcataaccactggcacgggtttcctgtccgtcaaaacgaatacctgcttcaattcctcctttactgtaattatacttcccgataccatatattcccatctgtgtctccgtatagttgggaataacgggaacaatacctgttcctgcctgactgtgattatcaatgaacataatttgtcccccaacctctgtttgccatgaattataattcaatttccagcagagagagttttgtaatgagtttaagtgcagggaaacagctggaatgtcggaacccagacgccggatgcggttttcctgtcggtcgtccttctgccaggaactttgccagtaaagatttcctgcgttccgcatactgaacttcattttaccaatggctgtctgatgggtaactttttgatatgggtatgcgatacttcgcgtgaaaggatctgtgtacaggggacgtcccaatcggatacgttctgccagcagatcttcacttcccatctgggcactgaacattactcccgtccggttgtaaaagtgactgtagaatccttctattcttaaacgtccacggtcatagccgagtaaagcggaggtatgatgttctctggctccagtgttatttagaagatagtttgcggtggaacggtctccggaatttgaatatgtcccctgtactcgccaggcaaggtcacggagaaaagggaaagtgccttccaactgtccggtcagcacataacggtgaccattacttccataaagtatggaagtctttcctttcaaggccttcttccggaagggtaagggagcctgttccatgacaataattcctcccaaagcttctgaaccatatcgtaccgcgtcagaaccttttatcacccgaatggaagcgtttccgttcatatccacttcaggagcatgatcaactccccattgttggcctgtctggcgggaaccattgtttatgattaatatccggttgccatacattccttggatgacaggtttggcaactgtcgtccccgtactgatggaacttacgccactgacctgttcaagcagagaggtgagagaagttcccaatgcgcgattgattgcgaaggaagtaaggttgttgcttaccgtattccgagtcactccggagcactcaccggtaataatgacttcttccagaatttttatctccggataaagatatactgtttgaatattcacctttttgaatgcctcactcaaatatatatattgagatttgtagcccaaactctgtacaagaactgtatccttggaatttgtcttccaagggataatgattcttcctccggttgaactggcaaggggttgattctccaataagatgtaagctccttcaatcggacgtccggtttccttatctacaaccaacagtgtcctatgtgtatctgattgctgtcggtatttctgtgcatacatccttgtaggagatattgcacacagccagacaatgaatagacacacatattggaaatatgcatgaaatgtcatactttacgaaaattgtaatgaagttataaattgtttaagataaccaaagggcacagcatccctctttcacatgtcatcttataatgcatgcaacccatgagagggattgtaatagttggacaggaggagcgcggagagacaataggggaaaagtaacagtaatgtccttctccttttggataagatattcaacggggttctctgtctgaacgcaattgtactcaaagctctcggcttcggtaaatgaagataaagtgaacaggcagatagcacatttatcggcagaatcatgatgggaagattgttgctcatcatgagatatacataaatcttctttgtgaacatgaaaggctttcacaaagaagaaaggcatcatagtcagcaacaataagcatgccactatggctctgtatttccgcttttttcttgcattatccattaggttgtaaagatagcagattgcataattgtacgcaatacctataaatgatgattttacgatcaagtacgattaaatatattgtcccgattattttgatatgggaatcaaataaatcgacacatcgttaccggctgtatgataacaggctataataaatcttcctatttttattcctgttcatattggagggcctgtgtaagatgccccctaaaaccaaaatgattcttctcccagaaaatattcagtaatgatctcttgataagttttgaccgatgagcattattattttaaaatcaagtacttcgattctcatataattgtttttaaattcgtttaaaattgaacggtgtccaattgttacgataatacttcagttcacgttgatatttcgaggacgcaaagtacggctcattcccaaagcataagagaaaggattgatgtcgaaatcgcgttcaaatgttccggttaccatattctttctttgcggaagtgtacctggaaagttttggttacgccaatttccttgtacagatatgccagcttttatcttgtcttcattccaatagaaagatttttttatatttattggtcgagagaggctactactaccctcctgaagttagtaaacggaatcattttttacttcctctttttttcttattgttgtgcattaataaataaagctcttgcaagaaaaaaaaggaatatttttgtcttagatatcattgtgaatttcaatttaaatataaacacaatattggaccggatcaatttgtcacaaatcattttataacgaagaaggtatgtgtatggacatattaaaaagaatagcgtcactcgtcaataccaaatcattagcaccaatcatttgaaaaacaatatacaaaaaacgctttccgccaatctcctttaattgggcggagttaagttcaaatcttacattatccaaatatatatcctttacagaagaaaagagaccattcaagacgttcttgctccatttattcttttcccattgcaatgaatcatgatccttaattacaaattccacatactgtatccatctatctatagaattggaaaacttatttttcacatcaccataattactattcttaagtttatttttcacaaactcatgcaaatccggtgttgagtaggctatcaactcattcttcaattcacttaagggtttaaaaccggtgaatattttatcaaattctgcaagcaacaagccaccattaccctttgcatacatgcttaaatgtagtgtaagcatgttgcctgtgtcgcttttttctttcagagttgtactgatttccacagcatacgcactttcatcatatgaaaaaatgtgaccattaaatagagatggattttcatatatccctctcatatacttctgttttataaaatctgtatttacagtaacctttccttcataatatttattcttgtcaaacagaagtgatattctttttttagacctactattattgtacctaagatagaaagaaagctgattttgctcatattttatatcttcaagaaccgtcttctcaagatcttccagagtaaaaagatatttttctccccctacatttatagaataaaagtccactaaccggcctaaattctcaattgtaaacatgttcactttatgtaatctgtaaaagctatcaaaatcaagctttgcataataatcagcatttgctttccactcagcttgtgcaccattaaccatttgataatcgtcaggtttgctcacaaagccggtaaaagtgaattcattcttaaaaggtgaaccatttaccgtgcctgtaacatatagcacaaatgagcctttttgataatctttccttttcactacagcctcagttatttttatcattttcccgtttatctgcagcgtctctttctgtgcttcaacaagtcctaacgcaacatttatatctctagacatatcaaatctaaaataagctgcaacatcctctttagccacagcgggaactgatccggattgttcactatgagattcttcctgttgcctgggatgtcgattccgggattcaatcggatcattctcaccacaagcaactaataacattatacagacaagaaataataggcacctttttatgttaaaatttcctaccttaaacaaatcacatgtcctatcacacataaacattactgtcttttcaatatatattgtgctgcgagccgcccgctattgttgaagatttccgtactgtcagacaagaccactgcgtcgtcgagaactttataatatgttttggcacccgatgaaggagtaaccagttcaatgatgttttcgcctatcatattatatacaccgctctcttcaaaaataccattctcctcacccagatactcactccgcaaatcataagttgcatcactattaattttcaatgtcgttttgatgccaccacagtcggcacaaggtaatatgccttcataggtgccataacaatctttgtttttgctatccactactccggcagcactattttcttgttgtttatatttcttcccagatccaacacagcctgatgttactattatcatggctgctaccaataaatgcaatttaatcaatttcataatttaaaatatttaacatataatttgaggttaattataactcgcaagatcattatatacaaagacttattgtaaatgcatagcagtatataacgaaattatcttcgtctcactcgctatgcattacaataaaattagaaaaaaaagaaaactatttaaccgtcacattgatagttcccgttttcttatccttatctgtaactgtaatagtagtttttcctgccttaactcctcttatgttgactttattttccttgactgataccgtagcaatattgacatctttcgcaacggcagaatatggctgtgcaccaccttttactgttactataccatcttttccaacactcacagtaatagattgtttatcaaaatccagtccttttggagtttttggggtctcttttacagttcttacagttacagcaacttttcctgtaactcccttccggtccgtaatagttatcattgctgaaccatcttttacaccggtaattacaatcgcatttttatctgatttcgcaactgcgatttttgcatcacttgatttcgtcgtatatggtgcagtaccattactaacagacacagtaaccgttttaccaactgcaacttctactttattaggactgatttttaaattgggcttatcatcatccttatcacatgataccaatacaaaagaagttaagcaacaaatcactaatgccatcgattttaaaaaaggtttagttttcatttttgataaatttaaattaatagataaaatgctaatgagtactcataaataaaaaagtcagatttttcttactttttctttgccagcaaaaataataaagcgaaattgtatttgaattataaaatgattttaaaaatctaacacctcaattcatatacatctaacaatcaacaccttagtgttatgaaacattattttatctcacattgaactaacatctgttcgaaaagcataaaaaaacaatattattccaatatcaaacttaaaaaaatatgtttcacattgctaattctgattatatggtcaatcttcataatagagtgatacactattataacaccgactgttacagtatccctaacagtgtttgaaaaagaccctttttatgatatttcacaaataccatatattccctataatattattcttaattagtgaatgagccattcaaagtaaaaattgaatgtatttttagcatattctataaaaatcaagaaaggatggccaattcaaaaagtattttatccaacaaacggaacattctttttacaagttgaaggtggtatcactcaactataattgtggatgatcaaaaacgtgtgttcaaaccatacacaataaatcttctatagcacaagatttcttgaacagcaagagataggtactcgcaagtccacgacaaaacgttttccgaggggatactgacgaacttaaggatattgaaatgaggtaccatacaaaagtcggttgttgtcaccaatattatcttaaaataactcatctacaaaagctatgtgttgtgacatcgtattgttaaaaaaacattgtcataaacgtctgacgtctcttgatagatttacttttagagggtatcatatagctatcttccatatcgtttcgagtcgctttctgtactcatttgatatcattcaggccatactcttgaacattcactcatgcaataggggcacttaagttctaataaatagattatctcgctagcagtctcatctctcaccacacagctagatttattataaagttaaattcaatgctcgtgcaaacggctgtttgttctgatttaatgtactctttgtttgaaggcacaaagatataatgagtatctaatattcaaataaactttgttttaagactttttatgacacaaacaaatacgaatgatttgaaaaataaattgattctctttcataagatgttctttcctataagttaataaaaaaaacactttatataattttttttctcttcattttttcgaaaagccccagtcttccattttttatagaatatcatttacatattcctattttttccatccatgcattatatacctcatttttaggtgaagttcacccactctctcctcttattttagtcagattatgctgccgttctttttttttcttcgtgaccttttcaatcatacataccgcattgaacgtatgtactccaaagaaaatccaaaatatttccacttccctgtttctggctttttattctggtctgtaaataatattatttctacattttaaaacttcctttcaatctggtagcactttcatggctgagttctgaccatcaaatcttacgaaatggagcaatttagatagctcagaccttgtacttaaagaagtattttgtaaaactttttaaattgatattattagtgtagcttgaatccgcagcaagtaccttaatcctaactttgatcagttgttgtaaatgaatacagtctttcaaatgtattacttcgttaaaagccgtaaaggagatatgttctataaaggagatttcatctatctgtatactgttgactttgcctccgaattaaacggatttgttttttcttgccttaataatagtctggagggactaaatattaaggaaatttgctaattactgacgaatcacattaacgatttaggattggttagtgaatgaagaggggcaatctgaacaccactaaataactggtaacgaatattactagttaaatatttaatcagttatgaatatgaaaagttgatataggacttcaagactaccaaggccattttattttcaggagaaaaaaataacttttaccccccccccaaaaaaaaaggagaggatgtcaagcatctgttgggttattcccaagaaagtgaacagagtatggaagctgctgatttattcgttacaactttgacgataatttttaagcatatcgagcggtgtaaaatctacctaaacaaaacacgatttcttttatatctttatcgtgtatttttattttagattttcatcggttggatttaaccgattgaagaataaacttttagcagagtatttgagaaatagaggtaacgaattagcaaccgtgcaaatttcagcgatttgcggtgctatgttgtcaaataactctttgtaaatacaaataaaatatttagtacaattttgaagacatcattaataaccttatttatatccatacacctttggtttgtttccctatatttattgataatcttttattcacatatttggtaaatatttcaatctacgtagattttataactaatagagtataaacaatacaagctattccaacaaataaagctacggcagagcatttggtaaatattgtatctttatttttaataccatacataagcccaataatagcacataaaggaataccgacaggaataatcgtcagaaaccaaatgagtattttatgatacccattgctgttaatactttgtttttcaaattactcatagctaccattctcattgcttgttactcttcgcatctctttctttattcatcaaccgccaaatagctttctgatatttcaacttggcgaacatctcgtcatcttggttatctatctttaaggtcattacccgaatacttggggcagtgggatatcggcttctcactatatcatccactagaaacccgcatagtccggtagccggttctgtaaacaagaaaccttgaaacatgagattaatatagtctgcattttcgcaaagatacgccttgtacctcttatatgtatccaacttcatataatcttctgcacggctgctgaaatttggcttggcaatttcttcgcataaggcagattctaatttgctgtaggtggcagtatctaaatctccccaccaataatgatcttcgggattgaccgacatatccacccattcagaagcctcccagtagtctatcgcaaacacaattgaatcggctttctctttggatgagtaatagatggaatctttctcccaacctttgaatatactttcaatagaatctattttctctttcctaattttattatatatgttttttaaatcgtagccatgaggtaacgatatttgaaaaacaccgttttcaattcttgcattcacctttggatttgtgattaccgtatcgtcaagtacaaaagctatatgtttgccaattgccttttctgtttcttttgcccatttttttagtttatgcttgcttatttgccccacaattacgcatgtcccattttcatcagaatccattcgtaacgaaacaaaatcttttactgttacaatagactctttagcaatactgtctttttgctgtgataggatgtgataccatccattctcatagtgggttttatgtatttgattacaggaagcgaaataagcaattaaaataagtattccgaataaattctttttttgcatgttcttatataataaaaaaataaactgttatctgttcctgaattgtatccgtcagatatatttaaagcattatgtttcaaattagctacttctccaaatatataagcaaaagtagattgtttgcctttttaagaagactgttcaaatctgttttgatattgtttttcttgatcacaacttataagatggattgtgtatagttatttcatctcgccaagcatattccttgttttatccatataattactgaaatgcgcctttacctgtcaaaaatatattaccgtaaataatgtaccgttttatcccaaaagatttaaaaacagttctttatttactatttttgcagatttgatacgtgatttgagccgtgattttcgagcatatacgttagccaccgtatccttcatgaataagctaattacttgtggtgagaatcctacaaaaatatagcataacagcctggtgtcagaagttttcatggtcggaaaatcttccttgagcttgtacatggcattgtcatgacaagtgtttacgattttttccaattcttgcagtatttcattgctttctgcaaaatctgtaattatctgctttacttcattaaatatgactgactgttgcgatgttgtattttcacgttcatagtaggtctttccaagtttatcgacaatgtcaaagcgtgaagcagccaatcctcttaaataactttccgtagtctgctgttttttcacgcgttcagtaagagccttgtactcggaattggctttctctgtcaataacaaataatggttggtacgatcacgttgcatgcgtaaacgttggcggacgatataccaggcaattccaataataaaaaaggtagcggctgctatagctatttcccagacagtccggtttttcattctgtattgggcgaattttgttcgctctttaaaatagtcccgctcgaccataccggcggagaattgcatgtttgagcgcattattgaatcgttcaagtagatatagcgatgtacattgtccgttgctttttcaaaatttttagcctgcacttcgatatggtatgcagtgtattgtagttctgccatgtcgcaaatatcagtagtgtgcgcctttgcaagctccagataataccgtgcactgtctatatgattcttcaaaagacttacatctgtcaatgtgtgatatccatataccgtatcctgtcgggcggaaagttcgattcgctgtaacaggtcattggatatatgccgtttggatatcacatatagtgatgcaagattagtaaggctgacttctatcagattactgttattatgttcatcggccaagtcaagagccgccgaatacagccttattgctttttctatatcttttgagtgaaaagtagcggctgccatgtcaagggttgcctttgtctcctcctggatatcacccgattggcggaaattatttctggcttcgtggaaataatgatatgcccggctgtagttcatttgtttataatatacttcaccgatctgtctgtataaaagccctttgtaataagattcatcggtatctgtcagtttcttttctattttgagaaaaagacgtaatgctcccggtttatcacctgtgcgtaatttaattcttccccaataatatagagttttacactggtgacgtaaatctttggggtaatgtttataatattgccaagcctggcggatcaatgaatcgtcagtaactttcatttgttttttttccaaagcttcggaatagagcaatgcatatctggcctgttcagcccggttgccttctggtttgagtttttgtagtattgctaatgcactatccgggttgttctgcattagcttttcagcctcactaaggcgaggggtctgttccctgttataacaacctgtaaaatagagaatagctgatagtccaattataatcttacatttcatattgcgaatataataatgtgttttattttttgcatgggcgattaggaatattttaccaatataaattattctttaacttatatgattatcgctcgctatttatatatattttttattgggcctaacaatatataattgcttattagcatattatataatatgtataatcgtaatagtacaaaatagcagtaagttattgctattcagagtaaaagtatcagttcactcgttgttgttaaaaaataaacttgactaccctaaaggtgtaagtgtaagtgcttttttgaattttatcaagggtgttagatatgtgttagattattaattgaaccatttttgcaaactactgattataagtaaaataaaaatcaatgtattagatttattcttttgtcctacaactaaaaagctctgcaatctttttacttttgcattcgaaaaaaataaaatctgattctccgcaaacacacctaatatttttagtatattagcgctcaaaaagcagggattatgaacatattcagttttacggctcatttcggttcggaggaagattgtcgtttgcatttcaaggagcagcgtgataaggaaggggttgtctgcaagcgatgcgggggcacttcccattattggttacagggtaaatggagttatgaatgcaaaggttgccgtttccgcacctcgttgcgcagcggtacgatcatggagagctccaagctgccgtttctggtgtggtacaaaacgatgttcctgatgagttgcacaaaaaagggattctccaccaacgaactccagaagcaattaggattgaagcgttacgaaccggtatgggcgatggtacacaaactccgcagggcgatgggcaaccgggatgcaaggtatacactggaagggatgatagaactggatgagggttacttttcggtggccagtaaggaaatcgagcgaggcaagggtacacgtggccggggagccgagggaaagcagaacgttgcggtgatggccgaaagcaccccgttggaagatatcgaaacgggcaaaaaggagaagcatgtgcgttatttcaaggccagggtactggatagccatcaaagtgaaggaatcaacggcgtggtcagggactgcatggaggatgatgccatcgtattttcggacaaaagcacttcttacgttgacatctccgatctggtggaattgcacgtcaccgagaaatcagacgccaaaaccaccaaggaaacactcaaatgggtgcatatcgcaatcagtaatgcaaaacggacattgctgggcaactaccataaaatcaaaaggaaatacttacagttgtatctcaacgagtttatttacaaattaaacagacggtattttggagacaaactctttgacagactagtaattgcgaatataacaggtgcataaacggataatcagaaaataaaacaatagattatgaagaaaattgctattttattagtttttactttgggaacatttattgtaaatgcccaatcagttgtagaaggaacaaagtttatggacaattggtctgtaggagtgaatgcaggagcagttacccctctcactcacgcctctttctttaaagggatgcgtcccggtttcggagttggaatatccaaacaattaactcctagttttcggtttggaatttcagggaatgggatatatcaatacaactccgagtaaaacagcttttgatgttttagatgtcagcttgttaagtaaaattaacttaataaatctatttgcaagctatcggggcaaacctcgtttgtttgagatagaagctattgccggaatggggtggttgcattattatgtaaatggtaaaggagatgacaattcatggtctacccgtctcggattgaatcttaatttcaacctcggtgaaacaaaagcatggacattgggaattaagcccgctatcgtatatgatatgcaaggtgattttaatcaggcaaagagtcgtttcaatgcaaacaatgcaacatttgaactgactgccggattgacttatcacttcaagatgagtactgggaatcattactttactaaagtaaaagtctacaatcagagcgaaattgatgatttgaatgttgctattaatgcacttcgcgaacaggtgggcagtcgtgacagagaactaaacaatgctaaccaaagaattagcggtttgcataaagagttggaagaatgtcgtacaaaggtcgttcccattgaaacagtagtcaagactgcccgcgttccggaatctatcattactttcagacaaggtcgctcatcagtggatgcatcacagctaccgaatgtggaacgtgtagcctcctacatgaagaaatatcccgattcaaaagtcattattaaagggtacgcttctccagaaggcaatgttgagatcaacgcaaaaattgctaccgcacgtgcagaagctgtaaaaacaatccttgttaataaatacaagattaatacgtctcgtattactgccgaagatcagggagtaggtgacatgtttaccgaaccggattggaaccgtgtaagtgtatgtactatcgaagattgatgtaataagaatatttggagttgttgaaggtaaataaaaaaggaagcccgaaatctgagggcactgaaaaagttctttttctccgttagctcctcttcttatgaattggctccaaagttgcatggcgtatgataaatttcatttgcatgcaacttttccttatattggtagtgagtaatcgtctattggtatacatgcacgctggcaacgacactctcaaaggagactttgaaagaatgcaacttcagtccgcttttcccatctgctccgactacggctcggaggctatcgtccttctgatctttgaccaaaagaacttcttggtctttgatttttttgctcatattactatgtatttaatgacgtcagtagcggtttacagacaaaagtaaacaaaaaaaagtgagtgctagagattgtaaataagtgagtatttgtagctttgatatgattaggagtagcatattgaaagttataaatttcatttgctgaattaccataaatggggaatggtaagtaaaaaaatcatcattttaaggtattgcaaccgaaaaaatatgtgactaattttgcgttataaaataaagaattatgttctgacctatgcaaacaacgaaggattatatacgtaagctattgctggaaacagcgcagaaagcttttttcgaaaagggcttcaagtcggtgtctatgcgtgagatttctaagttgtcgggcattggtctgagcaatatatacaattactatccctgtaaggacgatttactggttgatgtgttgcgtcctcttttggctgctatgtacaggatgctggaagatcacaaccgaccggagaatttctcccttgacatatttatctcagatgaatatcatcgtgcatctttgcaggagcttatgggcattataactcgttaccgaagtgaattaaatttgctgtttttctctacgcagcattctcgcctcaaagattatttggaagagtggattgagaagagtgccacaatagggatggaatatatggaaaagatgagaagactccatccggaactacataccgatatttctccgttcttcatgcacttcacctgctcttggtggattaatatgatgaaagaggtggtgcaacataaggaactttcctgcgaagagatagagtgtttcatcagtgagtatattcgctttagcacgggaggatggaagaaactcatgaatgtaaagaatgaaagatgaaggcagaactattgaaacatcctgtctgtcaagagataactaatcaaaacatccgtttctcgtcttgtctgcaatgcaagccttgcggaaatgattgtacgattgtaaacaatcgaatctcttttgtatttgattccgagacaataggcatcagctaccttctgctcgactccacacctatagcctgcatggacagatgctgcaatcttgtcaggcagcgtttcgtttgatgcaggagttggaacgccgagtcattccagaagaatcactaaataataatcagcatatgagtatcatcaacatcatcagcaacgacgaattaacactcgtacaaggagtcaacgggcttttcttctgcgaggagtcatgggttacgcaaagcagggcagtctcccgtatcggaaaggttttgcccaaagaaattattgggacgaaagatcaaagtaccaacatcgtacatccgcagactgaccgaactaaacttagttgccaaaagcatgaaacgtcttatttctaaatctaactgtttctcctaccgagcgagccgcctgcaaagagcggctcgctttgcttctgaacaaaacaaacttttgttctcttttgacgcactaacttccaatccatcatagccatgtctcaaccagtacttatagcatttttcctaacatcgtttgccggtatatccacagggataggcagtgcgattgcattttttgctaagcgcaccaatacttcattcctttctctttcattgggattttcaacagcagtaatgatttatatgtctttcgccaatctgtttgcctcttctttgcagactcttgccaatatacatggcaaggacgacggaactcttcattccacactttcttttttcgggggaatcgtattgattctacttattgataagctaattcctcactacgaaaatccacacgaaatgcatcgggtggaagaaatgagcttaaaggaagaacgaaagactgaaataaagcctcaattattacgcgtcgatgtagtgacagccttggtgctggcaatacacaatttcccggaaggtatggttacgtttcttgcagcattgaaggatataaacattgctatacctattgcctgtgccatcgccatacataatatacccgaaggcatttccgtctccgttccgatctattatgctacaggtaatcgtaaacgggccttttggctttcatttctatcgggattggccgagccggtaggagccgtcatcggctatcttatcttggcaccattcctcaatgaccatgttttcggcgttattttcgggatgattgccggtatcatggtatttatctcgcttgatgagttactacccgctgccgaagaatacggtaagcaccatcatactatctatggtttggtagcaggcatggcggttatggcactcaacctgctgatgttgtgttagcaagactaagtaatataaaaaacataagtaaaaaaaagaaagaatatgaacacttctcactcctgccgttgtcacgtgcatgatgcccacaaagagcattcttgtgtccacgcacattgtcaccattatcatatgtagccccaaagtggaaagctatttctcgtcacgctgctgaatgtgttgaaatgaatgaacttaccaataacaaacgatatgaaaatagaaagaatcaatgactggtttgcccgtcagggcagatggatggtacaaaaacgatggcttgtactaagcttgtttatcctcgtcttcgccataggatttacagggttaagatatttcaaggtgagtgcttcgtgggaaaactacttcctcgaagacgacccgatgcttgtcaagaccaaagaattcaaggatatattcggcaatgacaattttgccgccgtactgacccaatgcgacaattcgtttatgaaagagaacttagagctcatccgcgaactcacgaacgaaatgatggatagcatttcatacgccgacaaaatcacttcgctcactgacatcgaatttatggtagggaatgaagaaggaatgactatcgagcagatagtgcctgaccttattcccactgatgcggcaagtctggaaacgatacgtcgcaaagcctatatgaagccacatattgccgagcggcttgtctccaaagatggtacgctctcgtggattattctcaagttgcgtacctttcctaaagattcagtgtggaataaaggtaagaatgccgtttctcctgaagtgctaacggggaatgagctggagcatatcatcactaaagacaaataccaaaagctccatcccaaaggcacaggcttgccctacgttaccgccatgaagatgaaatggattggcaaagagatgccccgtgtgatgggcattgccgcactcgtttccattcttattttgttactcataacacgctccctacggggcgttgtcgttccacttatcacggcggcaggctcaattgtgattgtgtatggactgttgggatatgtcggcatgacgatagacagcggtatgatgatgatacctatgctgttggcgtttgccgtctcgatagcctataacatacatatcttttcctatttcaaacggcaattccttctacacggagaacgtcgacgagccgtagaagagaccgtgggtgaaatgggctggcctgtgttgttcagtgcactcaccacctttgccgccctgctgtcgtttctcgctattccgatgcagcccatgcggttcattggtatcgctacctcctcgtgcgtgatgctggctttcttcattgccattacactgatgcccgtgctgttgagttttggcaagaacggcaaacctcatcccaaagtgcaggaaaccggcggacggtggctcgaccatcaactggggcgtttgggagaaagcgtactccggcatggcacattgatcctatggattgcagggctgcttaccgcagcactcatttatcaattcaccaagatagagaccgcctttgacatagaacgcaccatgggacgtaaaatagcctatgtaaacaatctgctggaagtaggtgaaagcgaactgggatccatctacacctacgacgtcatgatagacctgcccgaagacggcttgacaaaatcgccggcaatgcttgtacgcttagactctctggcacaaaaggccgaaggctataagctaaccaagcgaacgactacagtgctgaatatcctaaaagacctgaatcaaaccctgcacgaaggagatgcggcttattatcgtattccgacgaatccggaagaggtggcacaactgctgctcctttacgagaatgcaggcggtagcgaagcggaatattggatcgattacgactatcgacgtttgcgcctgatggtggagatcagcagttttgactccggcgaggtagaacgagagttgaacgatattgcagccaatgccgccaggctcttccccgaagcttctgtcactacagtgggtagtattccgcaatttaccgtgatgatgcagtacgtggctcgcgggcagatggtttcatttgccatctctctccttattatcggcatcctaatgatgttggtctttggcagtgtacgcatcgggcttatcggtttgatacccaatatcactccggctttggtggtcggcggactgatgggatggctgggctacccgttggatatgatgaccgcaaccattatgccgatgatcctcggtttggctgtcgacgacaccattcacttcatcaaccacgggcatttggagttcgaccgtcgaggtaattatcgggatgccattctccgctcgttccgtacgatcgggacaccaatcattctgaccagtgtcgtgatatgtgcgaacttcgctatttacatgacttccgaaggcctctcttttatacacatgggtctgctctccgtagcgggtatcgtatcggcactcgtggccgacctctgcgttacacccgtgttattccaaaagttccggttattcgggaaagagatagaaaccaatgaaacaatcaattaatatgaatacattaaagaaacttcaattttacatgggcaaacgcaaggtgcttatgcccatagccctgacactgtcgggattaagcggtctgctctcgcttatgccgttcatcttcatttggcttatcgtacgctcgctactattgactggcagcgttgcctcaggaatccctatcaacgtctatgcatggtgggcggtaggcacagccgttgccggccttgtcatttactttgccgggctgatgcttttgcacttagcggcgttccgggtagaaaccaatatgcgacgtacggctatgagaaaaatcatgcagatgccgcttggcttcttcgaccggaataccagcggacagatgcgtaagattattgatgaaaatgcttctgaaacccacacgtttgtcgcacatctcttgcccgacctggcggggagttttatagccccgctgtcggttataatattgatcttcgtcttcaactggcaacttggtctggcgtgcctgatccccctcacggcggctgtcttcatcatgacacggatgaatacaactgctcagaaggcgttccaaaatgaatacctcggagcacaagagcatatgagcagcgaagcggtggaatacgtacgtggtatttcggtggtgaaagtgttccagcaaacgatattctctttcaaacgtttttacgacagcatcatcgcctaccgggatttagttaccaaatacacgctgggttggcaaaagccgatgtcactctacacggtggccatcaatagctttgctttcctacttgtccccgtagtcatattgcttatcggcaacaaaagcgaaaacattgcccccatcatcaccgatatgttcctgtatgtgctgattactccggtgatagcaaccaatgtgatgaaagtgatgtatctgcaacaagatatgtttctggcagatcaagccataagccgggtggaaaacctgacgagtagcgaaccactcccaatagccgaaaatccggagaaaatcaccgcttgcgatgtgacattcgagaacgtttcgtttgcctatcccaatgccggtcaaaatgccgtagacggtatcagcttccacctccccgaagggaagacttttgcccttgtggggcaatcgggaggagggaagaccaccattgcccaactcattccccgcttttgggacgtatcagcaggtagtgtgacgattggcggaataaatgtgaaaaacattgccaaagacaacctgatgaaccacatcgctttcgtcttccagaatacaaaactcttcaagacctctttgctggagaacatcaaatacggtaatccggcagcgagtgatgaagccgtgcaacgtgccatagacctttcccaaagtcgggagatcatcgaccggctacccaacggattgaacacgaagataggagtagatggaacattcctttcgggaggggaacagcaacgcattgtcttggcccgggccatcttgaaagatgcgccgattgttgtcctggacgaagcaacagcttttgccgaccccgaaaacgaacacctgatacaaaaagccctgcacgagctgagaaaaggaaagacagtgttgatgatcgcccatcatctgactagcgtacaggatgccgacaagatactggtgatagcacaaggcaagattgccgaagaaggcacacacagcgagttgatagcccgaaacggcatctataacagcatgtggaatgaatatcaacgaaccgtgacatggacggtataaacctcaggagacaacattatgaatattagtaaatattttcaacacagattcaccttatcggaagacggggcaaagacctttataaaaggggttatagcttctctttttctcaacctggcactgatgctgccggtaatcttcatctttctgttcatcaccgattacctgcaccctgttatccaagccgggaacagcacgacgcacgggctctggtactacgtgctgacggctctctgttttatgacggtactctttgtgattgcgatgatacagtacaagagcacctacacgaaaatctataccgagagtgccaaccgtcgtattggcattgccgagaagctgcgtaaattgcctttggctttcttcggagaaaagaatctttcggatctcaccgctacgatgatggaggattgtaacatgttggaaaccctcttctctcacacagttccacaactcttcgcctctgtcatcagcattatcttgattgccaccgggatgttcttctacaactggcaactggcccttgctctctttggggtcgtaccggtagcgacaacggtcatcttcttaggaaaaaggcttatggataaagctaataaggagtactatcacgtaaggcgtgatacgaccgagcagatacaggaagggcttgaagcggcgcaggagattaaatcgtacaacggagaggcagcctattgcgaccgtttagacaaacagctcgagatatatgaagccactctgcagcgaggcgaatttctcggagcggggcttgtgggcagtgcacagtctatcctgaaacttggtttggcaagcgttatcattgcgggagcttatttacttggtttgggcagcatcgacatgttcacttacttggtcttcctgctcgttgtagccagcatctacaaccccatcatggacgtgttcaaccatatggcgacactgatactactcgatgtgcgtatcgaccgcatacgtgagatgaacgacatgcccgcacagcaaggcgatgaggattgcacggtagagggttacgacatctgttttgacaaggtcgattttgcttacgagacaagcaagcaggtgctgcgcaacgtctctttcactgccaagcaaggcaaagtaacggcacttgtgggaccttcggggggaggcaaaagcacttcggcaaaattagctgcccgcttttgggatattcatggcggaaagatcacacttggcggacgggacatctcaaaaatagatcccgaaatgctcttgaaaaactatgccgtagtctttcaggacgtgttgcttttcaacgcttccgtcatggacaacatcaaaatcgggaagaaagacgctaccgaggaagaggtgaaagcggtagcacgtcttgcccgttgcgatgagttcatcgcccggctgcccaacggttacgacaccttgataggcgaaaacggagaatcgctatcgggaggcgaacgccaacgcatatccattgcccgtgcgcttctcaaagatgctcctgtcatcctcttggacgaagcaacggcaagtctggacgtagagaacgaaacgttgatacaggccggtatatcggagttgatcaagaacaagaccgtcgtcatcatcgcacaccgtatgcgcaccgttgccaacgctcatcatatcgtggtgctgaaagacggaaccgtcgcagaacaaggagcacccgacgaactgcttgcccgaaacggcgaatttgcccgcatggtagcacggcagaaggagaccggaatataaatcgaatcaatcagaatcaattataaagaaaaaggacaaatgaagagatcaatcgcagtagtagccatgcttgtggtggggttcgctgccacaacatgcgcacaaacgggcagagagattgcccaaaaggtaaaagaccgtcccgacggcgatacccgtcggtctgaaatggttatgacgttaatcaacaaacgcggagcggtgcgcgaacgcaagctcatttcctactccatcgatgtgggcaaagaaaagaaagaccgcaagagcatcatgttcttccaatatcccggcgatgtaaaggggacgggcttcttgacgtgggattatgatgagctaaacaaggacgatgacaaatggctctatctgcccgccataaagaaaacgcgccgtatcagcggttcgtctgccaagcaagactactttatgggtagcgactttacctacgacgacatgggcagccgcaacgtggacgaggatacgcacacgctcctgggcgaagaaaccgtcgacggacagaagtgctggaaactggaatccttgcctaaggacaagcgtgatatttactccaggaaaacggccctgatacgtcaggactgtctgatacctgtcagggtggaatattacgacaagatgggcaagctgcaccgtcgtctcgagatgtcggatattgccaaggtagagggcttctgggtagcccggaagatgcacatgaccaacgtgcaaaccgagcatcagacggttctcgaaatcaagaatccgacgtacaacattcccatggaggagagcaagtttaacgtgaccacgttagagaaaggcaggttctgatgaaagcgttcaatcgtctttccgcggggctttgcctctcggtctttctgttttgccccgtgcatggagtttggggacaaggagcgggcgaatcgtcgtggcagctcaaaggccttgtcgacacctaccacgccttccgctccgaaaagccgaacgattggatgtcttcccgtacccgactcaggggcgaggtcggcaaaaacttcgcaggctcttcgctcttcgtctcgttcaacgctacctacaacgccttgctgaaagagcgcaccggctttgaactgcgggaagcataccttgaccatcggcaggagcactggggctttcgtctcgggcgacaacttgtcatctggggtgcggccgacggcgtacgtatcaccgacctcgtctcacccatggatatgaccgagttcttggcgcaagactacgacgacatccgcatgcccgtcaatgccctgcggttcttcgtcttcaacgacaagataaagctcgaactgcttgccgttcccactttcgaaggatacaagctgcccaccgatgccgccaatccgtggagcgtgttgcctaaagaaacaccccggtcccttgtctgggacgcggagggaagccgccccgagctacgcctctccaacgtagaatacgggggcaggctctctttcgccctgccgggggtagacttctcgcttgccgcgctgcatacgtggaacaagatgcccgtcatcgagtacaaaccatcgggctcccaacttacggtttcgccccgatactaccgcatgggattcgtcggaggcgatgtctcaaagcccttgggacagttcgtgctgcgcggcgaagcggccttcaacctcgggaagcatttcagctacatacagcaagccgcctccacccctcaaaaaggattcaacaccatcaattggttggtgggggccgactggtatgcccctcatgaatggacagtgatggctcagttctcttccgagagtattttcaagtacgaaagctacgtcgcacagccccgccataattcgctccttacgctctgcgtgtcgaagaagttactggacagcaacttacagctttccgacttcacctatttcgacctcaaccacaagggctggttcagccgtttcacggctgactatgccctgaacgaccacatccacctcttggcaggctacgactggttcggaggaagcgagggtatgttcggcccgtataagcacaattcggaagtatgggcaaaggctaaatactgcttttgagatccacaccattttaataaccataaacaaaatttgaaaagattatgaagaagacatacgacagcagttaaagagaatgcggacttaagcaatcggaatcgtttaagttaaacggtgaaagacgttccaatggagcgatcaaagccgtttactgaagctgtttaagtagaacagcaaaattattcaaagtataaccatcaaaaacatcaaaagtcatgttactatacaacgtaaaaaaagaagagatgcgcatcggtaaacacaagggcaaaaccatgtattacgcctctcccattgcacaagacaagattaccaccaagcagctagaggatcggattgtcaatgccacagccctgagccgtgccgacgtgcggtcagccatcaccgccttggcgaaaatcgtacgtgaagagatgctcagcggcagaaccgttgacctggccaacctcgggtcatttaaggttgtatccaacgggaaacgcgtggaaacggaaaaagccgttaccgccgaaactctcaaaacaccacgcattcagttttttcccaaactcgaaatgcgcaatcaggcaaaaaacgtacagcatgtggtgatacgtgaaagcgaggccggatcggctaaaccgagtccgaatcccggagatttgcccgaagcacccgattctgctctttaatattcataacaagaaacaatgaagcagcaagtattatttttctttttcacgctgatgctcacaggtatcagcgtgtccgcccaaacaggtggaggacggattgcaggcgtggtcatcgacaatgcaggcgaagaaccactgcccggcgcaaccatcttcatcgaagagctgaaaaagggcattgtgacagacgggcatggcgagttcttactttccgatgttcccgcagccacttatacgcttactgtaaggtttataggctaccacacgcaaacccgcaagctcacggtgggtaaagagagagggaaaaaaatcatcatccgcctgaaagccgaagcaaaatcgttggacgaggtggtagtgatgggtaagagcgaagcccgtaagttacgggagcaggccatgcccatatccgttatcagcatgaaccagatacaaggaacggttaacaatgtacaagacattctggcaaaaactgccggaatcaccgtgcgtgccacgggtggaacgggcagtacctctcgcatatcggtgcgcggactggaaggcaaacgcatcgggcttttcattgacgggaatccgatgaacgacaattccgattttatcgacatcaatgatattccggtcgaaatgatcgaccgcatcgagatatacaaaggagttgtccctgccaagttcggaggttctgccgtaggtggtgcggtcaatattgtcatcaaagagtatccgcctaaatatttggacgtgaactattcttacggcagtttcaatacgcacaatgcatccgttgtgagcaagatgaacattgccccaaaaggaatcgagttcgggctgggaggtttttatacctatgccgacaacgactacaagatgaagtctccttttcaagaggggcttactataacccgcgatcacgacaagtttaaaaaaacagtcatcggcggtagctttaaggcacggaagtggtggtttgacttggtggagtttgaacccgttttcatacatacttacaaagatatacaggggatagaatcgaacatccggcatgcacacagccattccaacgcctttattttcgccaataagatggagaaagaaaacttcctcttagacggcctggacttggactggcagctggggtatatctataccgactatcattttgccgataccgcctcgcaccgcacacattgggatggaacgcattatccggcagtttccgaattcggcggcgaaatcggcaaatgggcttcattattgacgaatgaaaagcatcaattgcagcacaaattgaatctcaactatcttgtcaatgagaaccattcggtaaacttcaactctttgctgaaatacgctcatgccaaccctcgtgatgggatgaaggacaaggtcataggttatcgtaccgactttccaagcaatatgttcagttgggtggcaggcttgaattacgactatcgcacctcgaacgataagttccttaactctttcaacgtcaagtattactactactcgatgaaaacgcggatggcaagtgtcctggtaaagacagcagaggatatagacacacacaagaatgatttcggcatcagcaatgcacttcgctaccgcatcacacccagtctgatggcaaaagcttcgttcggatatgatgtaaggcttccatcggaagaggaactgttgggtgatggatacgtgatagctcctgccggcaatctcactcccgaacgcaatataagtgtcaacataggaatgttattcgatttaactggaaaagcctcctctaacttacagattgaactgaacggatactatatgcatctcaaagacatgattcgctttacgggcggattcttgcagtcgcagtatcagaacttcggcgagatgcggactcttggtatggaagcagaggtgaaagccgacatgacacggtggctctatggctatgtgaacgccacttaccaagatctgcgagatgtgcgtaagtatgaacaaaatacaactgttgccaaccctaccaaaggtagccgtatgcccaatataccctatctgatggcaaacgcaggattggagtttcacaaagaaaatctgttcggaggcagcgggatgaatacgcgcatattcaccgatgcttcatttgtggaagaatatctgtacgacttcgaacaaagccaattccagcagcatcgcatacctcgagccctctcgtgcaatataggctttgagcaaagctttggcaatgggcgctacttcattatgggaaaaataaacaacctgaccgatacaaaaatgatcagcgagtttaaccgtcctttacccggacgtagcttcactatcagattcagatacgtatttaagtaacaaattaacaatcattaaacaaaaaaagaaatgaaaaagaatgtattttttgtagcagcgatattcgctgcattgtgccttaactcatgtgacaagaatgatccggacaatcctattgcaggaggttcgggaaagattctcctaacaacagccctacccaatgcaacaggtatggatggaacggtttatatgcaactcattgatgagcctgtattaggcaagacgatggctaccaataacaacaatggtataaatgttccctttggcagttcttatcctatgataataggtcaggaagtctatgtcttcccaagctatcatttgacaatggacaaaaacgaactgattaaataccgtcgcacgaatggaattttacaaagagagggaagcttgcaattgcctgccaataacagtgccaacaatcttgtcaaactatcttccacaaaagcctatctatcgcttgccggactaggactgatttacatatttaatcccgaaacgatgcagaagacaggagagatcaacctgacctctttgggtattcaagataataatccggacatcggaatcatgattgagcgtgacggatatgtgtttgctggtctaagccagatggtgggaggttggacaagccctgagaattacaaacaagcagatgtagccgtcattgacaccaagacggacaagttggtcaagatgatttcagagaaaaccagtggtttttctcaagccacacgtccgatcgaccccaagtctttattcatggatgaaaaaggcgatatatacatttcttgtctcgggaacttcggaatggtggcaggtcataaggccggcatacttcggattaagaaaggagaaacagactttgatccaacataccattggacgataaccggagcttctatcgaaggagaagagaaagtagctggttttgccgcttcaatttgttatgcagccaatggcaaagcctacggatacattgatattcccggttattacaaaccaggagaaacgggacatggcgctatagcgagccgagctgtagtctttgatttatacaatcagaagatgaagaaaatagaaggattggatttgtccaatggctatggcgtgttagtgtctaaatataaagacggtttggcaatcgccaatgcttcaacgacaacaaaaggcatctattatctcaatcctcagacagataagattaatcctattcctatgataaccaccataggaaatcccatggctatagagtggttcggcaactaaacttataacgcgagttcgggatagcctccttccaaaaataaagagggtgtccgactgatgaagtgaccccaaaaatttggactggttaaacactatccagttatagaaagagttcggtattgtactggactctttccttttaaccgggacttaattcttttattattataataatctatatatccttccaaagcctttgtgaagtcttccggagactcgaacttttcagcgtatagaagttcagatttcataattctgaaaaaattctccatcatagagttgtccagacagtttccctttctcgacatactttgaattatatgatgctcttcaagccttttccgatatccgaagtgttggtattgctaaccttgatcagaatgaagtacgagtccgtcaaggttatcacacttatcaaatgctttatcgagcatgtcatatacttgttcaagatgaagtgcaccctcttacattttatttttttaggaatatccccaaataacttgatgtctgctttaacgatagaacctgttaggtgtttgcagcggacatcaccataacccattgccattaccactacttcttgcagttgttgtgagccctctcttaagttgatgaaaaacttccgctaattgtttaccggaacttcttgtgtttgataaccaatgaatgaaatgaccaaggtttcttcggaagatacattggctaatgcagtcggtgatacaaccgttgctggtaccttttacgaagactgacgcaccggtaaccagaccgaaatcatcattcacggtaccggaaatgcttagctagaaatagcttgtgagctgattctattttaaaatataaatgttagttttatgttagataattccggatactttaatcttaagaatttgattataatacatatataaatttatttgttagatttaaagtttttttttataactgtaaaatacagatttagccttatatttacaatatgatattattgattttatctagtaaaaaagcttttgcattataaggacattcaattcttcttccagaattgtagtatatgttttataatcataccaataagataaaaaagataatggtcaaaataaagctctcaaaacaaaatacttgttgttcaattatcttataatagtaaaaatgaatttgttgattccgcaaaagagtttgtatcagatgttgaggtttcaacaatattaaatattacttttatttatagtaactaatttgcattaatatgagaaaggtatttattcttttgtttatttctttagcattgttatcctgtcaaaaagaggaaaacaatagaaaaacagagtatcaagtattaacaagtaaggacgcatccaaaccgtttagctgtcttggagagaaacgtattattacgattacgattataaaaaaaacattaatagatgatgttttaagttcagaggttccgattattcccagggatgtttcggtagaatttgataaaactcttttttctgatatagaaacaaaagtggagggcgatcaggtagtattaaatataacctcaaatattaataaagaagataaaattttgaatgctgatttacagatttcttactctactattaatggcataaaagtagaaaaaattccactaattatagataaaggaaagttgacatttgtgtataaaatccattcggaacagaatccttttattctaccagctgaaggtggtagatttgagtcaccttttacttgtaaaaaacagacatatttgaatggccagtttatagaggaaacttattcatcattaaacggattgagatttaaaacgataagtagtggtaatgtctggttccttacagtcagaaaagacggagaaaaaattggtttttacaaattttcttttgtgggagaaggaccatataaccaaaaaacagatccagagtgctattttaacatatatacccatgatgcagatttaattacagataatcctacagaaatattcagacaagattttatacaaccccagaccccgggtgaggattattataaaccttcccggtcctcttataaacatggcacttttgacttttaacgtattcagtattaaccttaattatattaattataaaacagtatacacgtttgttgattttgacaattatgtttttaacttcatatttcgatgacagagaagtaatgaaacaagaatcttcgccaccatctttagtaaaaaaaactcggcttatcgtaactagtgtatattcactactttctatatactaatgcacttcttaatgtaggttatgtagtaattcattatttgaaagctgataaaatatttttttttgaatattttatcagctttgtatattgcataatatgatataaatgagatttatttttgctgcctcttggcacgcagcatttctgccgccttcatttccgtccaacgctcgaagtcctccacctctttccttattttccgtatcagtttcctgtccctgttccactcgaagcagttctccagtatgtcaagcaccttagcgtccattcccccgtcacagacagcttccccaacaaaacccgttaaatcattgtgttaatatatatttcatgtatctttgcggcatagatatctgttgtgaaacaggaatctgcttatattattcttgcttgtgacaagccggaatcttataacttagtacaaaataaaaaaataaaagaggagagcttccgttctatggagctcctctcactttttatctctagtgcccgactgccttttatctttctactttcccaaaaggagtatccttcccgccagcatacagcacagcgaaaacagtatagccactaaattcttctcatttgtgcaaccccttctgtattcatcttccaaccttgtatatcgctaccgagatagaaaatggacagatgcacagctggtacgtcaattatcaataccaatatataccagttcatacgttctccccaataaaaagatcccctaatttatttctagttcacagtccaaatttatactttcctgtaaaatacaggatatagtcaagtcttcaaagtttttcccctaaagacacagaaatattacaaaaatcaattatcacattatatcttatttctgatgatacaaaaggagatggcaatctattttttaattctttagatgacataaagaatgcctttaaaattaattattcagaatctaatttgggacttcctattttttgtaagggatattacaaaaaacaattccgtttttactttaactataagttctggtagggaccatccaaacatgttaccagaccaacaagaccaaggggaagagtttagaaggatgtattacagctactaaagatgataaatgccaaaaccaaattcattgcaattggaattggggtaacagttattttttatttttagttcaatcaagccgggaagaatgattaataataaaagaatcaagtctttaaaggaagatatcaataaataactcttgcaacatgcagtttctttctggctgaatttgcgactctggagctatattctgaggaacggtttggcggcggaatatgccgttaaaccgtccggttttcgttaaacgaaaacacaacttgctgtcccctctacggggacaacgtttttaagtagaactgtagattgccccgactggtgcctccctcccgatggcaacctctcccgatttcggtctgcttcttcaggaaagttggcgttttttaccaatattccggaggcggaataggctgtagcttcctgtaatagtagagcattctacgattatccgacacatcagatggcttctttttcgtgataattgaatattcagagaactgaatattttgataatcggataatccgaatactattatatctgtagtctcttggaatgttacacagtgacaactgaataattggcgttttggatattgctatatttgtataatggataagcaattataaaaggctacaattataataggctgttattatacattccccatcagagagaaagttccttgagcctgctgccgtccagccggtgaacggataccgtaccgtcacagtaaatagcgaatgttggcatgttcccgtccttcgggaaagtgatggagccggtattgcagaccgctgtatgctcagtccgttcaagtttccaccggtgggtgtgaccataaaaaagacaatcgaaccttcccttcggcagtctgtcctcattgtagatatgtccgtgggtgagaaagaaacgttttccattatccaccaacagggtgtaatcggacaggatgggaaagtccagcagcatctggtccacctccgaatcacagtttccacggatggcgacaatctcaccggccatcgcattgagacgttctgcgatccctttcgggtcaagtccttgaggtatcccgttccggggaccataattcaggatatctcccaaaatacaaagcattccgcattgctgctccctgtaaaatgccagcacttgttccagtgccggtaacgagccatgtatgtcggacacaatcaggtatttcatcataatctattcgttacgggttaagttttcaatgcacaaaaataagcataattatctaatctccctaaccggggaaacgatgagaaaaaaagacaggttccctgaactgtagattgctgtattgctgtccttgtagattgctgcaatgttataatcggatacataaaataagggtatttagccttagctaaactaagctaacagtctgacaataaggcttctaatactatgacatgtgggtttattatgctaccttagtggtataataataaaggataaaaagctatgaacgaacaagttagaaatatcttagaacagagtaccaccaagacgagcaagattgagcagctgctccgtctgggcctgatgcgcagggaaattgccgatttggtgacacgtggcaactatggttttgtatataatgttgagaagaaaatgcttgaaagagaaggtggagtcttgctgaacagggcagcaaccaccctgatggattacaccttcacccacaagttcggtattgagattgaagcctataactgtaatatggaaagactggcacgcgaattgagggaggccggtatccatgttgccgttgagggttataaccacacgaccaaggatcattggaagctggtgacggacagcagcctgcagggaaataatactttcgagctggtcagcccgatactggtgggtgagaatggcctgaaagagctggaaacggtatgctgggtgcttgacatctgtaatgcaaaagtgaatgacagttgcgggttccatgtccatatggatgcggctggtttcaatctggacacctggaagaatctgactttgacctacaagcatctcgaacacctgattgatgcctttatgccaaggacacgccggaacaatacctactgcaaaaccctctccggtgtttccgacgagagaatcaaatcggtaaggacgatagacggcctgcgggaggtctttaataatgaccgataccacaaggtcaattttgaggcttattctaggcaccggaccgttgagttccgccagcattccggtacgaccaatttcacaaagatggagaattggatccggttcttgaacggattaattacctttgcgaaaagatccagccttcccagccggatgacattggaggagttacccttcctggacgggaaacagaaattattttttaaacttagaactaaaaagttagcggtatgatacagacttatcatttgctggatggcggtcagataaccgccgccagcccggaagagttcgtccggctgctccgtgaggggagccggttcgactatgattgcacggatcaggagtatatggagaactttgcccggcgttacggggagctgcatggcgtgtcagttgccaccgatacccctgaacatttcctgacggacttgcaagccgccggttacgtccggtaaccggtatcgctcctttattattagtccctgcttcaaagatgaggcagggatttttcttttttcattgcaacctttcctgtctgcctgacggcgtttcctcctgtcaattcctgactatccatgactatccgtgacagggtatttcatcttttcccggcattcctttcttttgcagtgtagaacgatatacaattataagcattacagttttacagcattatatttttatctgattatataaagaaagcgtatgaaaaaagaaccgttattaattgcctttgccagccagaaaggaggagtcggaaagtctgccttcacagttctggtggccagtatccttcactaccagaaaggtttgaaggtgggtgtcgtggattgcgactccccccagcacagcatctcccggatgcgtgaccgggacatagaaagcgtgcaggaaagtgattttctcaaagtggtcctctaccggcagcatgaacaaatccggaaacgttcctatccggtaatcaaaagcaatccggagaaagcgatagaagacctgtaccgctacatcgaagagcaggatgccgtctttgatgtcgtactgttcgaccttccgggaaccctccgcagcgaaggggttgtccataccatttccgcaatagattacattttcatccccctaaaggccgataatgtcgtcatgcagagttccctccagtttgccgaggtggtggaggaagaactgattgccaggcacaactgtaacctgaaaggcatctatcttttctggaacatggtcgacaagcgtgaacggacagaaagctacgagtcctggaaccgtgtcatacaaaaagcggagttacacctgctggagtcacggataccggataccaaacgctataacaaggagttgagctccctgaagaacagtatcttccgttccacactgttccctcccgacaaccgccagataaaaggttcgggtctctgtgaactgatagaggagttatgtgccgtaacacatctggatgcctcccataccttataataaaaggaattatggacagcggaaaaaagaaatttgaccctcggagcattgatgagaaggccatattggatattgtcgccaggaaagggacgatacgaccggactcccctgcaacgagtgtatcccctaagccggaggatacggcagaggagattgccgggagtagcgaagctccggtctttaccaccggggaaatcgacgcttacagggcatccttcctgaatacggtcaggaccaaatcccgtaaatcattgcatatcgatgccgacctgcatcgccgcatctcttccttggtatgggcggtgggacgtggcgaggtgaccgtagccggttttgtaaaccaggtgctggcacatcatttcgaagagaacggcggattgataaacgctgtgctggagaagtattaccaatcactaaaatcataaggacatggaatacctttttattatcctgttcatctatgcctcttacctgagcattgaaaagtatgtgcatacaggcagcattttcacatggagaggcagaaaggacaagaaggaacgtcggactgcacctgccgccatccatccggcaattgctccgtctcaggcgggaataataggcaaaagccgataccaaatgcgacattcactgacaatagatgacaatagcggacagcctgaatcaggcatagaaaagagtgatacctttactcccgaaaagaaaacagagccggttctccgagtacacgaaccccttgataagaatacgaaattcccggaagttccggctctttttcaaaaactgaattatcctgaaattgattatatgcaggagccctctccttcttccggtgaagaaaaagaggagattcccgaacgctacgagattacgggatacgtacagcggagcaatccccaccgggcaaccggtgtcacctttgacgatatggatatgattgagaaagcaatggcatcggacgaacttacggaagcggaacaggaacaggcccggcagactttccaaaagctggaaggcacgaacatggaaagggtactgcaggcgagcgtcttgggaagcagcgataaactgaaacgctatatgcgtttgtatgtagaccggggtgaaccccatttattgactggaaagaatagggacgacattctccgggaatttgatattacggagcatgtgccccaataaaatagaacaagtaaggaatatgagacagtattatgattccggttgatccgggtgcagcgagttttaaaacagaatgtataacctaaaaagacgaaaaagcatgatagatttctttgactccggttgatccgggcaggacgggttcttgaaacgtagtgtataacctgttaaaaggaagatatagatatatgagaggcttctatgattccggttgatccttaccctttaccggagcgaacattaaaagagtgattaaccccttaaaaacggaggtatctatgattggttactatgactcaggttgatcctaaaaagacatcgtggttgcaaggacaaatccgcaggcaggaaacttcctgcggtttgtttgaaacaaggtttttattcacattaaaaaattagattgtatatgaaaagacattttaaaaagacggttgctcttatcgcatgaatagctgtttccaccctgagtgcctatgccgaaggggacggaagtgccggtataacaaaggccacatccatgcttaccggttattttgaccccgccaccaagttgatatatgcggcaggggctattgtggggctgataggtgccattaaggtatattcgaagttcagtagcggcgaccccgacaccggtaaaaccgccgggagctggtttggagcctgcgtcttcctcatcgtcgcggcgacagtccttcgttccttcttcctgtaatatagcaggctatggaatacaatatcaacaagggaatcggacgcaacgtggaattcaacggcttgcaggcacaatacctgtacttttttgtcgggggcttgctggccattttcctgctgttcgtcatcttctatatgataggtattgaccggtggttctgtatcggtttcggtgtcctctccgctttctctctgatcttcggggtgttccacctgaacaagaagtatggtcccaacggcttgatgaagctggccgcagtcaagtaccacccgtcctatatcatcaatcgcaaacgtatatcttccttatttaaaaaacgcattcatgagaaatatattaaaagccgcaacgctggaaagtaagtttccaatcctgtccgtggaggaagggtgcattctctccaaagacgcggacgtgaccatcggcttcaaggtctttcttccggagctgttcacggtcacttccgcagattatgcatccatgcacggcacatgaacaaaggcagtcaaggtactgccgaattatacgatagtacaccgccaggactggtttctgaaagaaaattacaaggccgacacgcagaaagacgggatgagttttttggaccgttctttcgaacttcattttaatgaacggcctttcctaaatcatttctcttacctgtttatcaccaagacgactaaggaacgcagccgcagccagagcaatttctccatcctctgccgggggaatataattccgaaggaagtccgggacaaagaaacggtcagcctgtttttggagagtgtcgaccagttcgagcgcatcctgaatgactcggcctttatccgtctggagcggttgaccaccgatgagatagtcggcacaccgcagcaggccggattgattgaaaagtatttttctctttcgcagcaggacacgaccacactgaaggatatacagatgagcgcgtcggagatgcgcatcggggatgatatcctctgcgtacatacgctttccgatgtggatgatcttcccggttccgtccagacggatacccggtatgagaaatactccaccgaccgcagcgactgccgtctaagttttgccgctccggtggggctaatgctctcctgtaaccatatttacaaccagttcctgttcatcgatgattcggcagaaatcctgcaacgctttgagaagacggcacgcaacatgcactcgctttccaaatacagccgagccaaccaacttaacaagcagtggattgatgcctacctggacgaggcgcattccttcgggctgaccgccatccgttgccattgcaatgtcatggcatggtcggacagccgggagaagctcaaggtgataaagaacgataccggttctgctctggccctgatgggatgcaagccccgttataataccattgacgcacctgccttgtattgggcaggtattccgggaggcgagggcgatttcccttccgaggagtcctttttcactttcgtcgaacagggagtctgcttctttacggaagagacgaactatgcggattccctgtcgccattcggtatcaagatggcagaccggacaaacgggaagcccctgcatctggatatttcggacgaaccgatgcgtcgtggtattacaaccaaccgtaacaagctggtcatcgggccttccggttcgggcaagtcattttttatgaaccatcttgtgagacagtattgggaacagaatacccacattatattgatcgacatcggtaacagttacaagggattatgtgacctgattcaccagcgcacaaacggtgaggatggcatatattatacgtatagtgaaaaacatccgatagcttttaatccatttttcaccgaagacaaggtctttgacctggaaaagaaagagtccattaaaacgctgatcatgtcgctctggaaaagggatacggaagtcattacccgtgccgaggaagtagcactctcaatggcggttaacctgttccttgaaaagataaaggaggacaatgagctggttccttcctttaatactttctacgagttcgtacagggagagttccgtggaatactggaggagaagcattaccgcgagaaggatttcgatctcactaactttctgaatgtattggctccttattatcgtggtggagagtacgattatctgctgaactccgacgagcagctcgacctcttgaacaagcgttttgtggtatttgaaattgacgaaattaaggagcataaaattctttttccggtagtcactgtcatcattatggaggctttcataaacaaaatgagacgtttgcatggggtgcgaaagatgatagttgtagaggaggcttggaaggcaatcgcacgtgaaggcatggctgactatataaagtttttatgtgcgcccgtaaaggttgcatcgtaaatatctctttggcaagagattaggaaagtgttctttgaaaatgacctatcatcagccgacttatctgtttcgggaaaacttaaccgagcagggagtgtagcatgtcggaaaagtcataagtcagttagttaccaaactgcgactgaatggcgagatgaaaagatagatatgaggataaagtccgaattgattgaacgatagtccgaatggtcccccttgaggctatggcgtaaggtaactatcaatcgccatatcgtgatactacttcagtgtataggaatgaaggtagcaagaacttatcacgacacaaccgcagtaagcgagtaaaggacggaagtcgtatccgacaatctatcatgccaacagttacgatgtaataaacggggattacctatcccgaagtgccgaaaggctattaggttcgacctatgaaaattcggagtggtaacggagcttccatagtagtttgagcaaggtaacgccttgtacatggcgaagggaagcagctaattattaatacaattaacggaaaatgtgagagacattatgagaagtccagaaagagtattaaacagtctatcagaacacagtaaggatgcaagctataagtttgaacgtctttacagaattttgttcaatgaggaaatgttctacgttgcctatcagcgtatctacgctaaagagggtaacatgactaaaggttcagacggtcagaccattgacaacatgagcctgaaacgaattgaaaagttgattgatacgttaaaagatgaaacgtaccagccccaaccgtcaaagagggtgtacataccgaagaaaaacggtaagaaaagacctcttggcgtgccgactttcaatgacaagttgatacaagaagtagtaagaatggtactggaagccatatacgagggaaattttgaatacacctcgcatggtttccgtcccaatcgaagctgccatactgcattaactcatatccaaaaggagtttaatggtgcaaaatggtttgtggagggagacataaaaggcttctttgataatataaaccatgatgtattgataaacattctcttggagcgtattgcggatgaacgcttcatccgattgatacgcaagtttatgaaagcgggatatatcgaagactggcaattccacaatacttacagtggcacaccgcaagggggtatcatcagcccgatattggctaatatataccttgacaagctggataagtatataaaggaatacacagccaaattcgacaaagggaagaaacgaaaattcagtagagaaagtatggactttggcaatgcaagaaaacgtattgtgcgaagattgaagttcgtaaaagacgaaaggcaaaggacaaagctaatccttgaactgaaagcaatagaacaaggacgggctaaatatcccaacggcgaagaaatggatgccgattacagaagaatgaaatatgcaagatatgcagatgattttcttgtgggaattatcggaagcaagcaggatgcgcaacagataaaagaagatattaaaaacttccttgctgacagactggcattggagctgtccgatgaaaagacacttgtcactcacacggaaagaccggccaagtttctcggatatgaaatcactgtaagaaagtccaatgaccaaagacgggataaacggggtagattgagaagaacctatggtaaaagggtctgcttgaatgtcagtacggaaacagtccgtaaaaaacttttcgattggggagtattggaactgacaaaccgtaacggaaaggaaatatggaaaccgaaatgtaaatcgggactgatattcaatgacgaccttgaaatccttgatagttataatcgggaaatcgtggggttctataattactactccatagccaacaactgcgcccatgccttgaataatttcaagtacatcatggaatacagcatgtacaaaacgtttgcaggcaaatataagtgccgaacacgtaaggtaaacaagaaatatcgtaagaacggtaggtttatcgtaacgcacatgactaaaactggtgtaaaggaaagatacttttacgacggtggcttcaaacgaaagaagcccacctataaatcggaatgtgacattatgccacgaacaatttatactgcggggcggacaagccttgttgaaaggctgaaagcccgtgagtgtgaattatgtggagcgacagacgaccttgttatgcaccatgtaaggaaactaaagaacttgcagggaaaggaaagctgggaacgacacatgattgcccgtaaacgcaagacgattgccgtgtgcaggagttgtcacaagaagatacatgacggaaagatagactgaaattagtggagagccggatacgctgagaggtgtaagtccggttcgggggcgagcatttggaaacctaccatagaaatatgataaggcgctgggtgcttagcctacacaaaacggttagaaagtattttggtgaggccgttgtcgtcactcaagaactggacgatattgtatcaagtcccattatcaaagacaccattatcaacaatgccgattgtaagattctgctggatcagcgaaagtatattaacaagtttgactccgtacagtccctgctcggattgaccgacaaagagaaagggcagatattgtctatcaatcagtccaacgatccggcacggaagtataaggaggtttgaataggcttgggaggtgtccggtccgctgtctatgccacagaaacctctgtcgaggagtatctcacctataccacggaagaaaccgaaaaactggaagtcacacaaatgacagagaagctgggcggcaatatggagcaggctatccgaatgttggcaagtgagaagaaaaagaaaaaataaacgattaaaataaagaagcaatgagaaagagaattataagcatgttgtttgtcctgtcggcctttatagtaccggcaagcgtacaggcacagtgggtggtgtccgatccgggcaacctcgtccagggtatcgtgaacagtgtcaacgaaatagtggagacctcggaaacggcgcagaatgccctctccacatggaaggagacctcaaagattttcgagcaggggcgtgagtattacgacaagctgcgcaaagtgaacgacctgatcagcggcagcgagaaagtcaaggagtccgtcctgatgctcggtgatatctccgagatttacgtgaacaatttcggcaagatgctaaccgacaagaatttcagccagcgggagctgaatgcgatagctgccggttataacaccatcatgaagaagagcagccgcagcattaccgagctgaagaatatcatcaatcccaccggcatgtccatgaacgacaaggaacgcattgacctggtgaaccgggtatacagggaaatgacacattacaaggaattggccaactactacacccgcaagaacctgcatgtatcctacctgcgtgccaaggagaagaacgagcagcaacaggtatttgacctgtacggcaaggatgagcgttattggtagtctacaattttaaaagaatcaattatggtattattatccatttcatttgaaaatatgcaccagattcttcggaatctctatgatacgatgaccaaactctgccacccgatgatggacatggcgatggcactcgctgcattaggagctttgttctatatcgcttaccgtgtctggcagtcgctctcccgtgcggagcccatcgatgtcttttcgatgttacggccttttgtcctgggcatgtgtatccttttctttgacgtgatggtgctgggaactctcaacggtatctttagccccatcgttcagggaaccggaatgctgctccgtgaccagaccttcgacttgcagaagtaccagcaggagaaggacaagctccgtgcggacatgatggctaagacgatgatgaccggacgtgtctttgcttccaatgaggagctggatgcggaactggataacatgggctggagtgaggaggagcatacggccttgcagaccatgtatgaggtttcgtatgccttctccctgcaaggtattgtccagatggtcatgcgcaaattgctggagattctcttccagtccgcttcgctggtcatcgacacgatccgtacctttttcctgatagtcctaagcattttgggaccgatagcctttgccctgagtgtttttgacggactgcagaacacgcttgtccaatggctggcacgctatatcagtgtctatctctggctaccggtggctgatctcttcggggcgatgcttgccaagatacagacgctaatcctgcaggaagagatgaacctgatggccgatccgatgagtgtcattgacgtggacggttcctcggccatctatctgatattcatggtcatcggcattatcggatatttttgtgtgcccactgtttcgaactggattgtccaagcgggaggtatgagtgcctataaccggaatgtcaacaatacgacatccaaggtgaccaatgtagccggtgctgcggcgggtgcttcgacgggaaatgtcggtgccgtattattgaaaaagtagaaattgaaaaaacataaaattatggaatttaaaagttttaaaaacatcgaatcctcgttcaggcagatccgcctgttcacgttggtctttctgggtatttgtgcctcactgactacgtatgccatctgaaagtcctacctctttgctaaccagcaacgggagaaagtatatgtattggatcagggcaagtcactcatagtggcgttatcccaagatgcggcattgaaccgtccggtggaggcccgcgagcatgtgcgccgcatgcatgaactgttctttacgctggctcccgataaggccgctatcgaatccaatatcaaccgggccatgtatctggcggacaagagtctttatagttattaccgggattggaacgagaaaggctattataatcgtctgatcagcggtaatattaaccagactgtcctggtagacagcatgcagtgtgatttcgataactatccgtaccggatcaccacctttgcccggcagatgattatccgaaacagcaatatcaccgagcgttccctggtcacccgttgcttcctgcagagtacggtcaggtcggataataatccgcaaggcttcatggcggaacgctttgagattttggaaaacagggatataaggaccgttgaacgctaatatattaaggtaatgaaaagcaggaagataaagacagagatcagcgaaaaactgaagaacgtttgcgaggagctgtccgaaaaagagcgtaagggagtgcttgtgggcatgctggttaccagtaccgttctatgtggtatcaccgtagcacgcgctttcgggcgttttctctctcacggcacacaaaaggagttgccgtttgtccatccggtggactccctccaccgggcggataaagacagtataatgtatcaccctaaaaccaacgagtaatggaagataaagatttggaaaagcccgaagcggcagaagaaacggcggtacagccggaaaacggcagagccttgaaggaagaacctgaaaaagagaagaaggtgctcacaccggaagagatggaaaaaagaaggaagttcattgtgattccggcctttgtgctggtcttcctgggagtcatgtactgaatatttgccccctccggcaaggaaaacgagacggaagcccccggaaattcaggattcaatgtgaacgtacccgaacctaccactgccaaactggtggataagaagaccgctgcctatgagaagcaacaggcggaagtggaggaagaaagccggatgaagtcgttggagcagcttgccgggacattaatgaacgaaggaaagggggcatccgataccggtgaaaaagaaaaggacggagaccggttgcaacagtccgttaatacctacgagcaaatctccgggcagttgaatgacttctatgagactcccaaagagacggcaaacagcgatttggaaagaaaagtagatgaactgaacaaaaagctggaagaggcggaaaaggagaagaacaaggcggctacccgagaagaactgatggagcggtcctacaagatggcggcaaagtatctgaacccggataaggatacggtccaggagaaagctgtcggaaaagaacccacggaaactgttccggttcagcgggcggagtatcagacgacctccggcctttcacaacctgttacggattccgcctatatcgcttcgcttactgtcgagaggaattacggttttaatactgctgtcgggaacagctaccaaatggggacgaataccatcgccgcctgcatttcggagaaccagatcattgaacagggaggcagggtaaaactccggttgctgcaacctctacaagccggcaacattaccgttccggagaacagtctggtaacaggtgcggcggtcatacagggagagcgtctggatatcctgatcagcagcatcgagtatgccgggaatatcattcctgttcagttggcgacttacgatatagacgggcagaaaggtattttcgttcccggatcggaaacccgcaatgcggcaaaggatgcggctggaacggtcagcgagagcatgggaaacagcgtttcgtttgcacgttctgccggacagcaggtggtcatggacctgacgcgcggagtcatgcagggcggcacgcggttgatcgccggacgggttcgcgcggtcaaggtgacactgaaagccggatataaggtgctgctggtcacaaagagacaataacggattattcactttaataaaaaagacaagacaatgaaaatagttatagcattcttgatggctgttctggcctcggtatccggtttttcacaggaggaaaggccggtaaatcccgtcaggattctgacggcgggccagcatatcatcccttataaaatagaggtcacttttgggaagacggtgcatatcctcttcccttcggaagtgcgctacgtggatttgggcagtaacaatatcatcgcaggcaaggctgacggagtcgagaacgtggtacgtgtcaaagcggcggtgaaggagtttccgggagagacgaacttctccgtgattacaggagacggctctttcttttccttcaatgtcgtttataaggaagagccttccacactgaatatcaatatggaccagtggatgaacccggacgagggagaaaagaaaggaggcagctccatccgtgtcacggaactgggcgaggaagatccgacggtcattgccagcgtgatgtacaccatccaccggctggaccgtagggacgtgaagcatatcggatgcaggcagttcgggatgcaggctcttttaaagggcatttatgtgcataaggacctgatcttcttccatgtttccctgacgaacaattccaatgtgcctttcgatgtggatttcgtgcgatttaagatagtggataagaagatagccaaaaggacggctcagcaggaaacttatattgaaccggtacgcacgctcaatgccctgacacgcatcgaaggaaagagcacgggacggatcgtgtatgcctttccgaaaattgtcattcctgacgacaagttgctggaagtggaaatttacgagaaagggggaggccgtcaccagcggttctatattgagaacagtgacctggtggacgcgcgtattgtgaatgaattaatcggtgagtaatcatgaaaagagttttatttattttgttatgcatttgtctgccctttgtggcaggcaaatcttttgcccagcgttacctgccggggcagaaaggtatccagcttacgttaggcggtgtagacgacttcggttcaaatgtgaagcatctgcatggtaatttccaggtcggactggctctgagtcggtataaccggaaccattcccgctggctgttcggggcggattatgtgaaaaagcactattcctataaggatgttgcgatccccaaagcgcagtttaccggggaggtaggttatttcgtgccgttcatctcggaccgtggtaagaacgtgttcttctctgccggtctttccgctctggcgggttatgagacgaccaactggaactgcaagctgctctatgacggggcgactttaaagaatgacggatgcttcatttatggttttgccccggctttcgagatggaggcgttcctttccgacaggctggtttttcttttcaatgtccgccagaggatattcttcggatcatccgtggggaatttccacacggtggcagctgtcggtgtcaagtacattttcaattagcagcaacagtatggaacaaggcaattggaacgtggatgagatgcttcattggctggatatgaaaataaaccgggaagaccggaacatacgtgaacaaagcaagaagatgaatgagaatttcctacactttttcgaatggaatgcggagagcctgtataagtctcattttatgtccgggtgttataagatactccggcaggcggtggacggggcaaagggcatggatacggtttggaatattgttgaggacaacattgcttactgtgagaacaaactgttgaacggtcaggtggattgtaacagttccagccggacaacgaatgttgcccatttcctgaagttggagtgtatgcagcagttagttagggattaccgggaattcgcgaatatccttgcgcaaacgcctcccgaagagaatttgcaacagacggctaataaaacagaaaagaagagagaagagccgcctgaaagaaagataaaaacgggcatcaggcgttagccgacaacggactcaatcaagtaaattattcatttagtaatacgtaaaatcatgaagatgaaattaataataagtggtatcatgctcacattgctttgcctgctgggtggctgtgatgataaattggaagtacagcaggcttatgatttctcgctaacgtcctggtatctccagaagaccatttccccggatgagaccgtggagattcgtctgacactcaatcgtagcggaaactatgaggaagccggctatcaaatcggttatatacagatggagggtagcggcgaggtgtacgacaagaagaaggtctatctggtgaaccgggagatgcaaccgttggattcgatagcggagttggatgacagcgatccctgccgccaggtattcacgctcttctatcataaccgaagcagcaagaatgcggaaattaaattcgtgatagcggataatttccatcaggaaagagaactggatatatcctttcagagcgaaactgaaacggacatggaactataaatcggacaacaatggataaaagtgatttaaggatcgaacaattgcagcaatatcttgacaagaagaaaggggttgtggaaagcgatataaaagagtataaccagcaactgggaaaaaactatcttcatttctttgactggcatgccgatgacttgtataaggcctgttatatggataagaattataaggccattcaggaggcgattgataccgctgaaacgccgaaggacattgaaggctatttgaagcgttgtaccctgtatatagaagaagatctcctgaacggtccgcttgtcaagaaaagtaccaacccgatgtcgaatatggcccattccctggagatggaatgcaaacaggagttactgaaggacctccggtatttaaacaggcttcttcagagtgagactgtaagtgaaagaataaggccgcaagaagcaccccgacaagaaattgtgcctgtgaaagaaaagaagaaaacgggaccacggttgagatagtatcaattgaaagcaataaaaaagctactgaatttttgtttcagtagcttttttatttatcccggtcttatattccggctataccagataagcctcaaaaagataatgtatgaataaccggcccttttccgtccagaccgtcaacatggccgtgcctgtttctcctgtgcggctttcccatacatgggtccgggttgctgtatagccttgattctggtaaggagctttgagcagccactgaccggattgacggaactggatgcctgcccatcggagccgcttgttcaacattccggcagtcattcccaattctttcgctatctgtgtggtcgtgtaggtgctttgggattgcaggactttgtcgtaatactgaacttttggggcctgtagcttgagtttcaggatagcatagttgttctccttctccaatgctgaaatacggctgtctcgctcttttatacggttctgtgcgagcaatatggcacgcgcaagcagttcattatccgtttcgccattcttcttaagaagatagccaccgttctttagtgtttcgggaaccagttcatcaaatatccagctttcgaatttctcagcggaaggcagcttgctaccggcaatcagccggtatacgtttccttcgctgatgtacttgattttctggacggcactgcgtgtaggggtgtcgtaaaccacgacacccattggtttacaatgtcttacgacggcatctctcggattggagtagccaagtgcggcggcaacatccgaggcgcagaaccatattttcccgtcaatttccagtgtccggatgcgtccgaactcgggatgttcaaatatcgatactttattcatgactgtttaatttataggtttcttctattgctttaaatatctcgtagactacctgggggacgatagcgttcccgtatcctttaatggatgcctgtcttcaccgagaaaaggagataccgtccaatcgggtggaaagcccatcatctcggctacaaacaggggattgagttggaaactctttccagtccgggcgaagaaatccggaaggctgttcttctgtggtatctttccccgtttcttcaggttctccagtgaaggtgcgcctttccaatcccgcgctgtcggtgtcggcatcacttgtccttctgccagccattgtaggatcgattcttccagattgttcccgtccgtgttttccagctcagtattgtccggtatcggttccggtagtatcccgtaaaagtccagaaaatccgtcaggccgttgggattcttctctccggctatctgggcatggggtgaggataaattcatcgatttccatttcctgactctttcggcatggtgtatctctgttgccactggcgttggcagaagcattccatggattatctccggtagtccctgctgcctgctgcccggccccctgcgcttgtagtcctgtgccgtcacggtgggcaataaaccaaactctatcccgtctgtgaggtgcaccgacggaacaagccggtataagtaccggctggacggaatatccttcgcgttcaagatcacggcaaatggtttcaacaacatattgctgtcgtcttttaaatacaggctcactctctccgaatagagtggattgacttcccacttcagtctcctgaccgggctgtaccatcgtgaggatgccagcaacgttctcaccaatgacccaatcgggcctgatctcatgtatggccctgagcatgtgaggccagagatagcggttatcatccgctccctttctttggcctgcgacggagaatggttgacaaggaaaacctcctgtaaggacattgatttttcctctccattccctgaaatctgtcgttgtgacatctgtataacttttcgcatctttaaaccagtaatttagaatggtattacaaaaatcgtctatctcgcaatggaaggcattctgccatcccattcattcggcagccaggtctggggcgccgaatccactaaacagggaagcgtgtaccagacgcttccgctgtttcttgtcttgctcttcttctttcattgtttattcattatttagaggttcgaggttcattacttttttgtcgatcttacgatagatgctccccatctccagcatattttccaatcggagcaggtccgtgatttcatagacggtcatccctttctgtgtcgtgaagcggatatatcctttctgtcgctgtatctccacttcttcgggagtcatgtgcaggacttcacagatttcctgcaaggtcagggtaaggcttacttccttaactgtgtagatgtaagtcaggatgttcagcatctggaggcatttgcggtgtgatttgacgagtgctgcgaatttgtttcgttctatgacgattactttactttgattttccatgtgaatttttatttatgagttaatagaatcggatatgaaatcttcgtttagacattcttctctcaggaatttatatacgtcagaagcccagaagtaaatcttgccgctgagtttgaaaaatgggagtttcccggaattacgccagcggatcagtgtccggtcgcatactttcagcatcaggcgcatatcccggctgtccagcatttgcttaccgttgaaactggttactgcttccagagccgtttccagcttggcaatcagttttcgttgttcctcaaagttgtcctttatcattgctttgagtatctcaatatcatttctgttctcttccatacaatattcctttgttctaatgggttatttttctttcttcggttgcaaagttttcaaaattaggcatgaaaaaatagggctgacggtaaccgccagccccacattttccttgtaactcacttggtatcaatgtgaattttcagaatattttttcttcatcaggatagaaaggggaatacacgcaattctccttcttaaaaagagactgatagaatgacagaggatatcggataaaaaaagggctgacaattaattgtcaacccttctataaatatgctatgattaacttggaagcatcaaaaacattgcttacctttgtgttacagagatatttgaaattatgcagagcaatgcaatgtgtagctgaacttccactactatatcgttacctgcatctttataaaaacacttttaatcgctgatttataaaagattaaaacgaactacactcttttttacagtagaaaagatagttacataccgtgatgaaatcaacgacttcacaacatatcccgaatcacaaatacaagggtgacagcataattgccatcacagtgctgtcacccactgctgtcacatcattaactatttataatctgatagttagaatgaaatcggtgacagatgacagatatattcttctttttaatttatagggagtgacagccagacggatgcaaagttataagactttaaaatttttcgtgtgttcaaccattttccgccatcgcattatattctgcaattttctctttgcaaagacgttcagtcatttcctttagaatctctaaacgtgaaattaagtattccagctgttcgcgtgtaattttgtaatctttgttatagcgggcctcgatataggctcggcataacagatcgaaacactctttttcatcatccgtattttgaggaaaaaccgttaccagttccatcgaaaagcgctttaccattccaccaaggtcttgaagtctgtgacttttcggacggtaattcgtaaaaaccatcaatatagtattataaagtttctcacaggattgatgaagcataaaggcagaaaggttgtatttttctttaagtataaaataatcctttacaccagttaggaagtcacaagcataagggaaaagtttatcaaattcattttgtgcaatatcccgaatctccctaaaactcaacttccgtggtttagccaattgatatttgccactatcgtaaagcaaaattccttcttttacaatatctgtaaagaaatactggctaacctccagattattgttaaccgtatttatatgttcgacaatgaattgcggaaaagcgtgacgacggtattcaaacaaatcatgatatttgttagtgatacgctccagttttctttctgcccgcttgactgctccgttggtgatgacaagaatatcataatcactctgatacgaggtacgaacaccgaactctattttagtatcccataaaacataattacccctggcataactcccgaacaggataatcatctgacagttatcgacgcttttgcagactaagtccagcagaactgtcagttcttcctgcgttcgcttgggcaaatgttttatagacttcttcatgaacacttattttgatgaccttacaaaggtaagaactttaccataccaagccaacaaggataccaaaaatcttatatgaatgatccatttcagactgttcatttattcgatggcgggaagtatcaaagaacagtccgcctatgccgacatagcatctctacgaacagtcccttttcagttatccctgccgcaacatttcttatatttctttccgctcccacaagggcaaggatcattccgtccgattttcgttccggagaatgtatcataaaacataccatcaaccattgtttgcattttaggagtgatatccatgcctgctgctttcatcgttggtccggcaacgatacgaggaggagttttcaccgattcacccctaccaagtaaagcagatgcttcggtggacgagtgacctttcaagaaccaacggggacaatcattacaatagtttacagctattccaaccacttcctgaagttcttgcatagaaagaaccttcgtgtctattgccgaaacaatagcagacatcggattttcgtccatctgtattgcataccacagccactgtatcttggcctcagccagttcttcattataacctaatttcctcatcataaatcctttcagttgatccgaatgcggattggaaatatagaacacaggcatcgttccagccgacaaaacctcttcgacggtaaacttcttcaaactttttatagcacgatgtgcatataatctttcctccaagtcctcaacttccaataataagggagatcgaacatacataacagaattatatatatcttctatatcaatcgtcagttgtctcatcaacattgaatttgataaacctttagcaatttcgtcctttgtcattgaacccttcaagtatccggtcagttgcttcaagaattctgtataaggtaagagaccataaagatttaaaattcctaaagcatactgctccagcacaaaacggctgttctcttccgttgatgtcaaaaacttatcaatatggggagcaaccgcttcacgcaactcatcacaaatcatataacgaatcttgtctccgttcaaaccacggtcggtcgcaacaaaagaaagtaattctaatgtactcgtcattatcatattaggttcttccacataggtattggctcctgctttcaccaatttttgaaggagcaaccattcataatgtgtcaactgcggaatccatatatccggacaagtcagaacagcttctgcaagacaggatacatactcttcttttcgcaattttgaaggaatgggaagaagaagtaactgtgctacatctttcaattcttcttttgtactcaatcttaaaccatccgccaacttcaccgacgatttaaacaactctgaatgacattttaacatatagaaggcttattattttgtttaccgacaaaaatagataattcttatgtaggattactatttccaagtaaatatttgctgataaaattagtatttatatctttgtgactcttaagacccaaatacaaaccaattaatgaaaaaattagtatgcgctcattcatcctgcttctctgtctgatccccactattatctgtgcacagaatctttctctggaggaccaactcaaacaggctatcaaaggcaagaaagctaaaataggtattgccgtcattatcgacggaaaagatacggtaactgtcaacaatgacattcattatccattgatgagtgtattcaaatttcatcaggcgttggcattggctgattatatgggaaagcagcaacagtcattgaactttgaactgaccataaagaaagaggatttaaaacccgatacttatagtccgctgcgggatagttttccacagggaggattcaatatagacattgcggatttattgaaatacaccctgcaacaaagtgacaacaatgcttgtgatattctgtttcaatatcagggaggggtagatacggtgaaccagtacatccattccctgggcgttacggattgtgccattgtctgcacggaaaacgatatgcaccaagacgaaagtctgtgttatcaaaactggactactccgctggccgccgcgagactcttggagatattccgtaaagaagcactgttcccacaggaatacaaagacttcatctatcagaccatgacagaatgccagaccggacaagatcgactggttgctccattgctcggcaaagaagttacaatcggccacaagacggggacgggtgaccgcaatgccaaaggacaacaggtagcctgcaatgatatcggcttcgtcctcctgcccgacggacacgcttacagtatagctgtcttcgtcaaagattccgaagagaataatcaggagaacagtaaaatcattgcggacatctcacgtatcgtttacgaatatgtgacgcatcaataaaatagaagtataacaacattaactacgattcttatgaaactacatcatatcgccatctggactttccgtctggaagaattaaaagatttctatgtccgctttctgggcgggacaagtaatgagaaatatatcaatcccaagaaggggttcgaatcatactttatctcttttgatgaaggtcccactctggagttgatgagtcgggcagatgtgcagaataccccgatagaggaaaacaggcggggactgacacatcttgcgttcacatttcccagcaaggaggagattcttcgctttacggaagaaatgcgctccgaggggtataccatagcaggtgaaccacgcacttcgggcgacggatactttgagagcgttgtactcgaccccgacggaaatcgtttggaatgtgtatacaagaaagaaccggaagcagaaagaaccgaagcggctctatgcccgaatatcgaaacgaaacgtctgctactgcgcccttttcaggagaatgacgcagaagcattctttgcctgttgccagaaccccaatttggggaataatgccggatgggctccccacaagacgttgaatgaatcccgtgaaatccttcacggcgcatttataggacaggaaggtatatgggctgttacattaaaagatacacagcaattgatagcttccatcggcatcgtacccgatccgaaacgggaaaatcctcaggtacgtatgctgggatattggctggacgaaccgtattggggaaaaggatacatgtcggaagcagtgcaagccgtgctcaactatggcttcaacgaactacagctcagcctcatcactgccaactgttatccgcacaacaaacgttcgcaacaagtgctgaagcgaaacggatttatctatgaaggtacacttcatcaggcagaacttacttataacgggaatatatatgatcatgaatgttactacattcccaatatagcacgccccaccgaacaggattacgatgaactgatacagctgtgggagaagtctgtacgtaccacgcaccactttctgacagaagagagtatccagttctataagccactgatacgcaaccactatctgccggcagtagagctctttatcatccgcaactctcacggaaagattgccgcattcatgggattgagtgatgaactgatcgagatgctgtttgtacaccccgacgaacagggaaagggatacggaaagcgattgatagagtatgccatccgccagaaacagatcgacaaggtggatgtaaacgaagacaacgaccaggctctccggttctatcagcatttgggattcgagatcatcggacgggatgaaacggatagcatgggcaagccgtatccaatcttgcacttacaactggccgacgataaaaaataagatactgaacccaaaataaaaatggatttacgcacacagctagccacacgcttccatatagaaaatatacgggaactgcttcattatataaaagaagacgaacggctcagagaagaaatttaccggctgatctttgatgaggatgacgttatctcttatcaggcgttgtgggtctgtacccacttctcaaaacctgaggtagagtggctgactctgaaacaagacgaactgatagacgcagcacttacctgcccgcattcgggaaaacgaaggatgttactgaacctgctatgccaacaacagctagctgaccctccacgagtggacttactggatttctgtatggaacgaatggtatcaaggcaagaaccggcaggagtgcagtctctttgcatcaaacttgcctatcaactgacctgctccatccccgaactacaacaagaattgcgtaccatgctggaaattatggaaccagaactactggttcccgctattcgttcagtgagaagaaatacattgaaagctatccaagcaaagaaaaagaaagaacatccgaactcataatatattcagatggaatatctgggaaatacctgtgacggaaatctgtataccgatgcaaaaggtaaaaaaggcaacgagcttattaatgatctgatttcctacaggtcccagtttctgaatgatcctctgtccctgtgaaagaaacacatagagtatccccgccatacaaataatgaccagtgcaatgaccagataattgattccggtatgcaacagtttgcctttcacactggcagatgccatcaaagtaaagatcacggatatactgcccggaccgatactgataggaaacgtgataggataaaatatcttctgttcgatgctcttccacttgaagctgtctacattctggctggtcccttctttatcggaagaattggaatcacccagcaattctatcgcagtcttacaaataagtattccaccacccagttgaatcacgggaatcgccagaccgaaaatcaataagaataaatgacctatcagcaaagtgcctacaccgatcattataaagttaatggttagtttctgaatagccgtttttcgttgtgaagggtcgaggtttgcaaagaatccattgacgacaaaaccgtttcctaaaggattgatcaccggaaacaatgccataaaagaagatgaaaatatgattaaaagactacttaaagacataacgctcactttttaattgctttatgattatttgaatacatatataatacgtaaaaacactcagcggcgcttatggatgccacaatgaggacaaacctcttattattttgatattttaaccgatttccgtgtatttacatatcttgcatccaataaataaaacaaaaggccgcttcctttgcaggaaacagccttatcttatcttttcgtcgttactcaattaaaataatacaggaacacagcaatcccttcaagggctttcttcggttgatccttaatctcaattgcaaacttgatttcagcttttgccacaccgcgcagattggtcaatgaatgcagagtagtcaccagacgaatgctctgtccggacaaaacagcctgaccgaatttcatcttatccatcccgtagttgatcatcattttcagattgttcacctgaataatctgattccacaggtaaggaagcatggaaagcgtcagataaccgtgagcaatcgtgctatgatacggactgtctacttttgcccgttctgtgtctacatgaatccactgatgatccagtgttgcgtctgcaaaaaggtttatacgttcctgagagagttccacataatcggaaacacctatttgttgccctaccagcttttcaaattcttcgtacgagttgataataactttttccatcgtctcatcgttttatgggggttatacatattgattaatggggcaaaaataggaaaaataaatgatatgccacctatttacatgacaaaagcgttaacataaaatttcatagatgctcctgtccgttgaatgcctgcttcagcgccgtacttaatatccgatacccttttccattcaaatgcagatcgtcaatagtcagttccggatttaatctgccgttcatcagtaattgatcaaaaacatccagataaatgacgcctgtccctgtcagttttgcaactatcttctcattcagcatgcggatgaacttgttcacagccgtactgtaatcatcataatcattacggggaaaaatacaaaagagataagttttaacctttggaaccgcaagaacagctttcacataccgctctacataatcatctgtattttcttcattcagctgataaatgtcattgctcccgaactgaatcactacctggcagtcggatgtatcttcatgaaatgactcgacatacgccagcccttctccgggagcgccgtagttcagacattcccattgagggaaatatacattcagtgcccagaatgccatgtggctgttacctacaaaagcgaattttggtttgtcttccattttattcctctattttattccaactacaaaacaaatatagaataaaattcgcggatttgccttacttttgcaatcaataacgatattcagataagaatcaatgatacattttttcgaccaaccgttttcccatattgcactaccggaaaggtttacataccctttcaactatactcctcatccgctatgtgtattagcggccgaagaagtcaaagcttatatctcgacaaagaaagagtggcaagaggaactgaccctcggaaaaatgttcggagtactgatcgtacaaacccaggaagaaggatcttcctctatcggttatcttgctgctttttccggcaatctggcaggaaagaatctgcatccgtatttcgtcccacctgtttacgatttgctgcaaccacagggattctttaaaatagaagaagaacaaatttcagctatcaatgtccgtatcagtgcattggaagttaatcctcattatctgcacttaaaagaaaaactagacagggaaacggaacaaacaaggctggctcttattcaagccaaagaggaactaaagacagcaaagaaagagagggaacttcgccgcaagtcatcccctgccctgtctgaagaagaacaggacgcacttgttcgtgaaagccaatatcagaaagcggaactcaagcgattggaacggggatggaaagaacgaatcaaaacgctggaagaagaggttatcacctttgagacggaaatagaaaaactaaaaaacgaacggaagcaacgttcggcagccttgcagcaaaagttattcgaacagttccgtatactgaatgcgaaaggagaaataaaagacttatgtactatctttgaacaaaccgtacacaaaatcccccctgccggagcaggcgaatgtgccttgcccaaattgctgcaatatgcctaccttcaccaactgaaaccattggctatggccgagttctggtggggaaactctccgaaaacagaggtacggcatcacggttattattacccttcgtgtaaaggaaaatgcgaaccgattctgcaacacatgctgcaaggactggaagtagacgggaatccactttcgccccaagcacacaggaaggaagaattagaaatcgtttttgaggacgaatggctggtggtagtcaataagccatccggtatgttgtctgtccccggaaaagaagaggagacggattccgtttaccatcgtgtaaaagctaaatatccggaagctaccggtcccatgattgtacaccggctggatatggctacttcggggttgttacttgtcgccaaaactaaggaagttcatcaacacttgcaggaacagttcatcaatcgcagtattaagaagcgttatgtagccttgctggatagaaatggattgaaccagcaactcgaagaaacaggaaccatcaatcttcctctttgcctcaatccgctcgaccgcccccggcaaatggtcagtgaagaatacggcaaaccggcagttaccgaataccggattctgaactattccgataagtacatacgcatcgctttttatccattgacagggcgtacccaccaactacgggtacatgccgcccatcatcaaggattaaactaccccattctgggcgatgaactctatggaaaaaaggcggacaggctctatctccatgctgaatatattgagttccgccatcccgtttacggcgatatcatctgcatacagaaggaagcggagttctaaaaatagtttcttccgatatgaactaaattctttttgaaatgtatataggggtaattactaactttcaaaaagaacctgactatgaattttaagtttcgaattacaaagtatctggcagtatccgcactggcggtgctgctgttaggagcctgctccaaaaacaacatttatatggatgttgcctatccgaacggagaagaaaatagtgacggagaagagggaaacaatgacaatcctgacaaaaaagatgcactcattactttcagtgcttccgtagaaggaagaaatataacgcgtgccatgtctccgatgggaaaaggattgcagaactggttatgtgcctacccttccaataccaccaatacgatagagggagagcctgtcggtgaaggcaactatatcacttcttctcccggagtgttgacgggaatacaaagttataaaatgtatctcagtaatgatatctatagtttttatgcggtttcctgtaattccagcaaccccgctcctacctttaccaacggcaagtccgaagcattatccaatggggtggattatctgtggtggcatgccctgcatcaggatgtgaccagttcacaagtcaacattcccatcacttaccagcacgtagccactcaggtcgtgataaccataacgggaggtgagaatattacactcaacaaagtactctccgccactattactcccacgaaaccgggagctttcatggatctgtcaacagggatcatttcttcagaagtcagttacgataagcctgccgacatgggaatcaatgatttcacggttcaatatatcatgcttccgctgaaaagttccgacccgatggctttaacgatggaactgatggtcaacggagaaagtttctcacgtacttacaatacgaccattatcccgccagacaatattctggctgccggaaattcatatcttttccgtgcagtaatcaacgaaaactccgtatcattcggtaacgtgagcgtaaaagactggacggatgtagatgaaagcggtaacccgctgtatccgatacaagactaaaatatgataaagtgtgtgtcaaaagtaactaaactcccctacgggtatattgacttttgacacacacttcaattatgcaacgacacttgtcagcacctgacgtttcaacctgcgataaacataaataaatgcaggaatcaaaaacaaatcagccgctatccatgccatcggatcaccgtaacaaacagcgataaagccgaaagccggcacggcataaatactgacgagaatacgtgcaatcatctccgacactcccgaaaacatggcgagattagtatatcccaccccctgaatcgtatagcgcaggatacaaagtaacccaagcatcgggaagaaagagactgatatatgcaggaaaagttcagttttctccaaaatctcaatttccgacggatcaacaaagatcaaggcaaaagatttggctcccaccatcagaatcaagaaagtgacggctgtataaataaccatcatcagcgtgctggctttaatccccgaccagatacgttcaggctttccggcaccgtaattctgaccgctaaaggtagccatagccatccccaggctctccaacggacaaaggaaaaacattttgatacgcatcgcagaagtaaaagctgccacacacgccgtacccaacgcattattcgcactctgaagcatgatactgccaatggccgtaatggagaactgcaatcccataggaacgccaatggaaagcaacgtcttcgccagcttcgactggtatttccgttctttcggcgtgccccgcagaatgtcaaacttccgatacatataaacgtaacaaagaaaagcggaaactccctgcgaaaagaccgtagcaatggcagctcccatcactcaccagcccagtaccaatatacagaataaatcgagaataatattgagcaccgtagccagtaccaagaaatagaaaggtgtcttgctatctcccaaagcacggataatgctcgacaacagattataaaagaaagtacaaggtatcccgatgaaagtaacaagcagataagcatacgctccttcaaagatattctccggtgtacgcatcatcttcaaaatatccgcacaataaatactggtaaagatggctatgaccacagacatcacaacagcaagttgcagactgacggaaacgtaactgcgcatcgtactataatccctcgccccaaacttctgtgccacggggataccgaatcctccacaacatccgttacagaaacccagaataagaaacacaacggatgtactagccccgacagaggctaatgcgttaatacccaaaaactttcctacaattgcagcatcaacaagcgaatacgtttgctgcaacagattgccgaacaaaagcggcagagtgaaattaaaaatcagaggtaatgccggccctgccgtcatctctttagaagttgccatacgtctatgtcctaaaaattggctgcaaagatacagaaaaatccggttgaaagattctaatcccgcaccctctttttattgacataaatcaaaaaaagacgaagtgccggaaactgtctatctcttcaccagccttttcggcgaaccatgccaggaacaacccagacaataaacttccgtcaaatcaaatccatcggtggaagcagccggatctttaggcacaacttctccattttcgagtacatagaccaaaagacgctctttacggtcattcaccacatatagggcagcaatcttgcattgcggacataataactttctcatgccgcaaagatacacatagtttccagcaacggcaatcattccagtggaagttctttgcagaatatgcgatcagtttattatctttgccgaagtgaagccagcctccaaagcgaaaagaaaacaaatggaaacagataaaaaaccgcgtatcactcaggaaaagagaaccgtagagatcatgatccgtctctattgccggaagaaagagaagaatgcaactctttgtccggagtgcgaagagttgctccgctacgcacatgcccgccttgaccattgtccgttcggagagaaaaaaagctcgtgcaagaagtgtcccgtacattgttataagcctgccatgcgcgaacggatgcgggaggttatgcggttctccggtcccagaatgttattctatgcccctttagaggcgatacgccatttattctcctgagcgataaagctatcctaatgaattctaaatagaagagtaatgaaaaaattgactatctttgttccaaaaagatgaaacgagccattatcataggcgccacctccggtatcggaaaggaagttgcccaacgcctcctgtccgaaggatggcagatcggcatagcgggaagacgccagtcagttctcgaagagttccggcaaatcgcaccggaacagataaaaattcagtcactggacgtcactcaggaagacagtgccggaaagctgaatgcgcttatccatcaattaggcggtatggatttatttttgctcagttccggcatcggtttccagaatatggaattgaatatggaaatcgagctgaataccgcacgtaccaatgtcgaaggtttcacacgaatggtggataccgctttttcctatttcaggaacaatggaggcggtcatctggccgtcatcagttcgattgccggaaccaaaggtctgggagttgcccctgcctattctgctacgaaacgctttcagaacacatacatcgatgcgcttgaacaactcgcccatctgcaaaagttaaacattcactttactgatattcgtccgggatttgtagccactgacttactgaatgacggaaagcattatcctatgctgatgaaaaccgaccaggtaggccgcgacattgtacgtgcacttcatcgtaaacagcgggtagctatcatcgacggacgttatcgtattctcgtattcttctggcgaatgattccccgatggatatggaaacgtttgccggtgaaaacaaaatagcaagatcggataactgagtacttattgaaagtaactatatttgtaaacagataaaagagaattatttatcatgcttttactcacttaaaatcaataaaagatggaacagaaaatttgtcagtgttgtgctatgccgatcgatgaaacgacattcggaacagaagcagacggcagcaagaatgaagagtattgccagtattgctatgcagacgggcatttcaccaaagaatgcacaatggatgaaatgattgaactcaacctgaactaccttgaggagtttaataaggattcggaagtaaagtacactatagaagaggcgcgggcaacgatgaaagagttcttccctcaactaaagagatggaaacaataagctaaaaagggactgacccgaaagttcttcttccaaacgtttctttgccacaaaaagatggacagtgtccaaatatccattgcaacaaagagaaaatgacttttcgtgcttttaggtcagccccctatttattcaactatccgcattcatttccggatggcgttcaagccacctcacagcataagagcaagtagctttcggtttcattccgttggcgagtgcaaagtcataagcagctttcaccagtgcagcagcaatcccccgtccttctataggtttggggacaatggtgtgaataatatcgagataatcacctaacaggcgatattctacaaaagcggtgcgaccgtcgacttccgtcttgaacagtttctgttcgggctgatgagtaattttgtaatccataatgtttattttaaagttgttcaatccattgtagccgattcgtatcatagccacgacgttcggcggcagttactaatttcttttttatatcctccggcagttggggtgtccggctcaatatccagagatatttatcggtgctgctgccaataagagcataattgtaattctcctggtccaattccatcacataataatcggaatagaaattcaagaaaaaagagactttcagtttaccgggctgtgcagggtcgggaatcttggcgtgtccagtagctgttttacaaatatcgtaaggtgagttacgtttatatccccgattctcaacgcgaattgttccgtcgggacggagggtataagtagcggtcacttccgtaagaccacgttcgaaacgatggtcataccgcgcaatctcgtaccaaagccccatatagcgcttcagatcaagccgatctaccgtactgtgatccgtcccctcaaacaacttctctatggtaggaacggaaaaatggaatccggcttccagcaagcgtgtaggacgcactctctgtccggctgtcagaaaagaggcggcttcaccatagagcaaacgaaagaccgcttgcggaacaatcaaagttgtccacgcatgatacgcctttcccatcgcacgtgtaaacgtggactgtgaaactgcttgcggagcaaccagattgaaaacacctctcaactcttcattttcaataaagaaggacatggcgcgacaaaggtcacgaatatctatccacggaaaaggttgcgtacccgggcctatgacggcggcaacctttgttgcacgcagcgggcggagcatttgttgcatcgctcctccatcgggagaaagcacgacaccgaagcgggtaatgacaagcctggtcggttgcggacaacgtttcgcttccttctcccacgcataacaaagatcggacaagaaaccatcgccacgagtctgtgtatactcgtccgattccaccaaagaggggtaatatcctacagcagaagccgaaatcatgagtttcggtttggttttgactgcattcaaggcacggataatgcggtgtgttaccgttatccggctattgaaaagctcttgtttatgttccggcgtccagcgctgattgatgggagcgcctgccaaatttataatgacatcgcaatgcgtcagcgtctgaaccaaaagtccggacataccttcccgaaacatcgctcttcccaaaggaatgatccggtgtccacccttttcggtcagatagttagaaagatgtttgcctatatatccggtggctccggtcattgctatattcatcttgattcttcgtttttttaactatactagagaaacgtattaaaagcagaaaaagttcttttatttatatagaataaaatcattctaataaataaatgttatctttgtgccacatgcaaacaaataaaaagacaaaacttgtggtcaaaatatgctctattctatttctagggacatttttgttctgcgcctgctcttcaagagaacggaccgaaacatcatttttacaagctgaatcactattagaagaacaccccgacagcgcattgcaattacttcaaacattgcctgcattacaaaagctttctcacaaagaatccgcccgctatgccctacttttagcgcgggcaacagataaatgtgaaaaatcactgctaccctgtgattcattactgaacctagctttgaattattacgataacgacgagaaagagcgagctgtagctttactttacaaaggacgattggaaatagaaataaatagtacaaaggaggctattgcccatttgcaagaagcgctgactatattgaaagactatccgaaagaaatagagatcaaacggcatacgctcagttcgttaggaaatctttatttcgacgttaattactatgacgaggcgtttaaagcatatcgggaattatacaaatgttgcatcacagataaagataaatccgtagcactaaacagttttagtttatattattgcacacaagaccaaaaagattcggcaataataatccaacgtaaagcacttgattatgcgttagattcaggtgactcttctatgataggcatatccgaattcaatctaagcattaattatgatgaatttgaagaacctgattcggcattgtatcatgcacgcaatgccattaaatggtttccaaaaggaaagattccaggaagttattatggtcatcttggaagcttgttgtacgaaagaggagaaaataaagactctgccatctattatctcaataagaacttagaagatactaaaaatatagcaggcagaggcgctgctttattaagtttgtatgatattgaaaaagatctaggaaactacaaagctgcatctgcctatttagaagaacatgtagaaattttagattctatgtatagtacagaacaatacagcgagctacaacaactcattaataaatataatatcaaaatccatattagggaagagcaaataaaagagcaacatcgactccagctcataatcgcactcttcattttttgttgcttacttattatattattctatcaataccatattaacaaaagaaaaagaatacaacttatatatcaacagaatttaaagcaaacccaatataaactatcttcaatgcagactattattgaagataatcaatcaataatcagtttgctgcaagaagaacagcgcaatctgaaacaagaccaagcgaataagatagatgaaatacaggaaagagaatctacaatagaaagacttagacaagaaaagcatgaactgagaaattggttatttacccaaagtgatatatacaagaaaattatcgccctttcgaaacaagaagtatctgacaaaaaagcaatgaaggtattaacaaatgcagaactaaagaaactccaaaagattattttcgaaatttatgccgattatatatcatacttacaaaaaaagtatcccaagttgactgaagaagatattttatatctctgtctaaatgaagcaaaattgcaacctctaactattgcactttgtttcggttataacaatacgcaccccattaatcaacgcaaattaaggataaaagagagaatgaaagacgaagaaatgtaaagtgtgaccagcattttactatctcattagttatcaagatattacaaaacagcaatgtgactgcaaatattatccatctatactaatactccatacctttgcctccataaatcaataaaagaattgaatatgaaagcaaagtttttatttatcttattatcggtattatttattataccaacaagtgcagcaatactaaataagcataagcacaaaattcgacttacctcatttactctaaggaataaggcaacaactcgttcccctattgaatttaatatagatgtacaagaaaccaacagttgcttgcaaattatctttctgtcacctctgccggatgcagaaattactattacagataaaaacgggaaaaccgtagttcatgaaccacccactttcataaacaaaggtaaaacattgtatatagaaactccaaatggttatccttatacagtaaagattatctctcccataatggatataacaggagatattatagaagaagaaagcgaataaaacaataaaaataagatgaaactaaacatttatttaatcggagcattcttcggaatgcttattctagcatcatgcggcaacgatgatgatgaaactcccgttcctaaagatgattcatggtattggggatactttaaaggagagataaacggaaaggaaatatctctggaaaatgaagctcatactgattggtctgttcattcagtaaaaacaagtgcatctcctcctaattacgataccgattctataaggggaatgatgacaagcataaagtacggtgaggatgaattacttagcataaccatctatcatttacataaaggaatacgttatataacaaaatcaacaaaaacagattggatatatgatggaattcaaataacacgtgatacacatagtgataaatatgaggacaaatatatttactatatcccccaaaaagagaaaccattccaagtagaaattactaaatctgcctatgcagaccaatggcatcctattattgaaggaaatcttaacggagtgctttatcgttcagataaccctaaagattctattataatcaatggttcatacggaaccagataatttttatctattactaacttttataaaaacatgtattatgaaaaagattttattaatgctcgcaagtgcttttttcatgttttcgtgttctcaagaggaaggaacttctcctatcaacgagaatacaagtaatttaccagtatcggcaacagccgatacgcaactcaaatttgccaaattgttatcacaagccgcctccggtagtatcgaagtacgcaacttcttgaaaaaagaagctttagtacagtttgacaatgactacgacattttctatccattaattaaagataaaaaagtatctggcaaccaaagttttagagatatattattatcatactgcaaagaagaaaacgaattgagtcaaattgagcaatctcttcccttgttaaacataatggttccagatctcactctattttgggacttcaatgccacaacatgggatacaagtgataaagaaatatcagtattgtgtagagatgacaaaaacaacacactatatgaaaatggcgaaaacattggtaatatgacaaacggagatattcctggtttcccttgccttgttgtgaaaaacaatgaacgcatgaaaattactagtgttaatacaagatcaggagaggctacttatgaatttataagtgatgcttttgatgggagcaaaaaggtgcaaacccggcattatgatgctgataatgatttagaagcaaccgaagatttgaataaatatgttagtaaagatgtagtagccacagctattaacgcttggcgagaattcaaaaacgtccctaatgcctgccaaagagattatatttattatggtatcaataaaacaaatactcctggaagcttaaatagaaatatcagagaaaaattataccgatttagaattagtgctactgcatttggaagaatcgcagatgccgacggtgatcaaagattacaagacttgacccaaactaaacgttacctttcaaatgaagaaattcttcagaatatatggacagatggaaatttcgaattccgattcaagtcctatattgcaggagaaacaaataaagatgcgatggaacatttgctcacattttccgtaaaagcaaaagatgtgttctccatagaaaagatacatcttcatcataaaaacggtaccgcatttagacaatcaaagaatttctattcagtagatatcaacaatttaagatcaaaatggatttatccggaaaaacttgaacccaataaggataaccaagttttcacattaccatgggatttatacaacaaagctctttccattcatatgtatgtagaagaattcgatgttgatcagacaatagaaaaaacaataactgtagtaaatgaatttacaaacaaagcagacttttctatcgaaggaggcggaagcatagatagcgtcaaattatctgccaaattaggatatggtttttcacacaccaataccacaactagtagtactaaagttacaactacagtcggttctgacgaattaggaactctttccttcttcttctatgaccctattatcagagcagaatctaacaatacctataaactatatgacgtatctagcggtgatgtgacagcaactatcttaccgattaatcttattattaccagataaaagatataaatacaacatctatagtttataaaattacgctgataagatacttactgactatctataagccatctatatcaaataaaataactagactttaacttgatattcagaacatcgtggaggaaattaaactttagaacaagtttgaatccttcactttgttttgaatatttatatatacgctttgcaaaactcatatacttttcctccaaccacatatagtcattatcctacacaagaaatcgagatttcatttcttaacagtgataataaaggccagatattgcagcaacctgattttgttccaccggatttgtttagttctgactaataaatattatatttgcatgagaacatttataaaatcagaaatagagactatatgatagaagcacccgaagcccgttatctctgcgaacaactcactgagacagttgtaggaaaaagaatatcagatgtatttattcaattcagccctcacaaattcgcttggtttaacggcaattccgatgagtttgccgaatggttagtcgataagaggataaacagtgcgcagtctcagggaggtatggtagagattacaatagaagataaagtgctcgtactcacggacggagtaaatctgcgctatctgactccagggaccaagctgccggccaaacatcagttacttattgcattcgaagatgaaagctgccttatagcgtccgtgagaatgtatggcggactcatgtgctatgacaagaatgctgctacgggcatgctttccgaatattaccggacagcgaaaagcaagccgcaggtcatgtcggacgctttcagcaaagaatatttcctcggactgattaatgatgaaagtgcgcagaagaaatccgccaaagcctttctggctaccgaacagactgttccgggactgggaaacggtgtcttacaggacattctgtatcatgcccacatccatccaaagaaaaaaatagcagcattaacagacaaagagaaagaaaatttgttctatcaagtaaaggaaaccatgaacgatatctaccgacagggtggacgaaacacggaatcggacctgttcggagaaaacggcaagtatacagcttgcctctctaaagacacggcaggcaaagcctgtccccgttgtggagaaaccattgtcaaggagaattatcttggcggtagcatctattattgccgtggttgccagatattggaataagaaccaatcaaatgactaaaagaaaacagaaaatgaagaagtttaccaagatcaactacattctaacctttatattagtattctgcatcggagctaccctgcctattctgatcggtagcagtcatgtagacgaacagcattccgccaaatcggaagtaccttattgcgtcacctcacctaccgttcccgagcaggtgacttttgacggagagacgatcgacctccgccgttacgaccgccgcgagcggatggaccgggagatgatggcgttcacctatatgcactccaccaccatgctgcttatcaagcgtgcgaaccgttacttcccaattatagaaccgattctgaaagcgaacggtatccccgacgatttcaaatatctgatggtcatcgaaagtaacctcaacaacatagcccgctctccggccggtgcagccggattatggcaattcatgcctgctaccggacgcgaattcggactcgaagtaaatgagaacgtagacgaacgttatcacatcgaaaaggcaacggtagccgcctgcaaatatttcaaacaggcttatgccaaatacggagactggatggctgtatctgccgcctataatgccggacaaggacgaatctcctctcaactggaccagcaacttgccagccacgcaatggacttatggctggtagaagagacttcccgctatatgttccgcctgctggcagtcaaagaaatattcaagaatcctcaacgatatggattcctgctgaaaaaggaacacctgtacccgcctatcccctacaaagagataacggtcaccacccccattgccaacctaagcgattttgccaaacagcagggaatcacgtacgcccaacttcgagatgcgaacccttggctacgcgaacaaaccctaaagaacaggaccggaaaaacatacgttctccagatacctacacaagagggaatgtactatgatccaaagaagacggttgcatataacaagcattgggtaatagattaatgtaataggtaataagtaataggtaaaatacaggttattgggatattggcctgtcaactgtttattctcatgaaactaaaagaaagaatccattattttatgaatgaccaaaagctgaaacataagctgtacgtcatcatcttcgaatctgacactccttcgggaaagctgtttgatgtggttcttatcggctgtatccttgccagtgtattattagtcattatagaaagcctgaaagggctcccttcttatctgactaccccatttgtcgtaatggagtaccttttcactgctttctttacttttgagtatctgacacgaatatattgctctccccgcccgaagaaatacatattcagtttcttcggcattgttgacctgttggctaccttgccgctttacatcggtttgatctttccgggagcacgctatctgcttatcatccgtgcatttcgattgatacgggtattccgtgtctttaagctattcaatttcttgaatgaaggcgaacgactgctcaccgcacttcgggaaagtagtaaaaagattgcggtcttctttctttttgttgtgattttggttacttccatcggaacgttaatgtatatgatcgaaggaactttgcccaattctcaattcaataacattccgaacagtatctactgggctattgtcacgatgaccaccgtaggatacggagatataactcctgtcaccggactgggaaagtttctttcggcttgcgtcatgctgatcggttataccatcattgcggtacctaccggcattgtgtccgcctccatgatgaaggactacaaacggagaagagacaaagaatgtccgaactgccatcggtcaggtcatgaagacaatgcgcagttctgcaagtattgcggacacgatctgaatccgacttcaaaaaacgaagataaagagaatgtacaataagcaatcgccaaacaagaaagtctgttattccaattaacggcgtctgaatatttgctcaaacagaaagataaagatacatcctactccatagcagacaatatctttccaatcgaacgtggagcccaaaatgattcttaatgcacggttggtgattcccaaagtttccaccaactgaaaatattgcagcacttcgacaaaacaagcgaacaggaaaacgtaaaacggcagacggggaacccctgtcggtataaatatacgtacgaaactatataccagcaccacgaccaaagcatctcccatataaggacgtacgaagctatcacgtacatacaaggctatgaacacctctatacaaaatatcaccagaaaactaatgatgtaaaatatccttttcttcatttcttattcaatctttggcgtaatgcacggttttgtctgcgaatatacgataaaatgcagatgctacgttcaaatattactaaattaatagcacaaaaagagaaaagaattgtatatttataggactaaccgtttttaaagaaaaaaacagaagaaacaaacaaagaaaagaaaggagaccgaacctatgatgttgaacgttgattttatgttaagattactggtggcaggaatactgggagccatcatcggactggaccgtgaatatcgtgccaaagaagccggataccgcactcacttcctcgtatcattgggtagtgccctgatcatgatcgtttcgcaatacggatttcaagagatcatcaaagaaaacagtgtgacgctcgaccctagccgtgtagcggcacaagtagtcagcggcatcggattcatcggtgcaggaaccattatcctacagaaacaaatcgtccgtggactgaccacagccgccggcatatgggctacagccggcatcggtctggcagtcggcgcgggaatgtacaccatcggcatagccactaccgtactgactctgatcggactggaactgctcagctacatcttcaagagtgtaggcatgaaaagttcgatgatctccttctctactaacaacaaagacagcttgaaacagatagcggacagatttaattcaaaagattatatgattgtctcttacgaaatggaaacacagcattcgggtgaaatggaatcttatcaagtcacaatggtcatcaaatcaaaacggaacaatgatgaaggacatttactttcgttgatgcagaaatttccggatgtgacggtgcagcggatagaataagcctacttctgcttctccgtcagatacttccagtagcggacaggcatatcctttttatgcttcctcggattcatgcgttctttaatgcagatagccttgaaatacgttttccagagcttctgaaagatcttctcattttcatccatcaagctctcgtccagcatccccgtaatcagatgagcttcccggctgtcgtcatcaaaagaaatcgtagtcacttcctgcaaatcatagtaaaagccataacgccgcttcatatcatagataatccacttctgatcggcaaaacgatctttgaaatgctggatggtaagcggtaaggcattatactgcggttcgaaggcagcaaagaacgtaccgtccgccgctttctgaaaacgcacgaactgcatcagatgcatccgttcgccatccaccttcttccatatctgggcaagcagaagcacatccggatcgccgaagttagtctcgatagaacggggagcgtcgatcgccttacgaatataacgaaagataaccatccctatatccggcaattccgacaaccaacactgggtgaggcagccaagcgcggaagaagagactttcttctgcaagccacgccacacacgggcggctttctcttcatcggtgaccaccgtatgcaattcatcataaaacaaaggcaaagcatccccttccgataacaggaaatcgggaaaggtcttacgaaaataagcgtcgaagacagcagtcagcagaccatcaaaagttttatcgtagatatagacgttcattatcttccggtttacaacatctgaaactccatttattccccaaaatccagtatcaactggcggtcgtccaccttcttcttaggcttcggaagcagcagactgcgtacccgctgcggagaaagctcattcaccgtctgcatctgcaaaggcagttccctgcacgtaatgaagtactgcgcttttttcatcaccacgcctatcttcttcaactcataaaagcccagacgggaaaaacgacgggatgccacaatcaacttagctgacttcaccccgatgcccgggacacggagcaacatctcataatccgccttattgatatcgacaggaaactgttccggatgacgcaaagcccacgagagcttcgggtctatctccagatctagatcaggatatgcgtcatctacgatttcatccactttaaactgatagaaacgtagcagccagtccgcctgataaagacggttctcacgtaccagaggcggttgtttcagtgcaggcaggcgtgtatcgtacgtattcacggagacatatccggagtaataaacacgcttcatcgtcggtcgcccataaagtgccgacgaaaggtaaaggatatctttatccgactcggaggtagcccctacaatcatctgcgtgctctgtcccgcaggcgcaaaacggggagcatgacggaacttctgccgttcttccttactttccagcacaccttgctggatatacttcatcggagcgaaaacgctcttatgatccttttcgggagccagcagtttgaggttctcttctttcgggatttctacgttgacactaaggcggtcggcatacagtccggcttcattcaccagttcccggcttgctccggggatgcttttcagatgaatatatccgttaaagcgatgcacctgacgcaaatctttcgccacacgcacaagccgctccattgtataatccggactacggaccacaccggaactaagaaacaagccttcgatataattgcgccggtagaattcaatcgtcagctctactagttcggagacggataacgtggcgcgaggcagatcattactgcgccggttgatacagtaggcacagtcgtaaatacaataattggtcagcataactttgagcaaggagatgcaccgtccgtcttcggcaaagctgtggcagattccccagccacctacggtattgcccagcatgcccggtttgttggagcgcactgtaccgctggatgcacaggatacatcgtacttggccgattctgcaagtatctttagtttagtgaggacattttcgttcatggacccaatctgattacagacgcaaatatacgattttaatcggaatgccggttgataacgaaccaaatcactcgtattttgttctctataaacaaaacaatcagactttataataaaatcagtctatatatataaaaaaagaggatgcccgtgggaaaaatgtgaggggcatcctctgtaaggaacagatatcgggaaagaagactttcacaagcattgctttccatctgttccctgtggggttatcttcactaacaagtgaagaaagggttcattgcagaagtccgggctttcacaagcacgggcttcctcttttacctcccatgcaggtccctcatacttttattaatagaatagaggaatggggtatatacccgcatgagaagtgggaaaatattattctgcaatacagacacttacccggttttcttcaggcacccggaaaggctgtactgtatctcctttaaaatccgtaacgattctgtccggcgctattcctttgtctttcaaggcatcggcaacaatcttcgcacgtttttctgataaagtcatattgattctcggattaccggtttctttgtcggcatatccggttatggcaactttgcttgccggatacttttccatgtatgccaccattgcatcgatcttcgattgctggtctttctggagaagtgcggagttcagagcaaagaatatattctgtttcataggttccactaccactgccacaggttccggttcgggctgtttcacgacaggttgtggtttaggttgttctactattggttccggttcataatataccggagctgttttcttatagctttttcctaatttgatgttcaggcccactaatacgttaaattgccagtcacagttgcctgcctttttcgagttgaatttgtcggacagtacatttgcgtttccttcaatattgatagccagccggtcattgaggcgcagatcacatcccagtcccatacgtccggctacaaggttttgtttgtcttgccataaatactctaattcatgagatcttgtgtccagtgcgtttgcttcgtcgttgtcgaaagcatgattcaatcctacgccgccaaaaatatatccattgaatacacgtttcggattaaaaccacaaaataaagtactgaggtctgccataaggtccagattgccttgcagatatttgtactgataggtttgagaaggagtgacccatcctgcctttgcctgccaaccgcttacgcctaaacgggctccaaatgcaggtgcaaacttataccctacattgacagctgctgccggagagatcagatctgtaaaatcggcttcgcctactgtgtgagcagctcctgcctgtacttgcataaaccaatgaggtttgaacacagtcttgccttcttccttgatttgtcgctgttcctgagcgaatgctactgtgctgccgacagtaagtatggctattaataaatttcttattctcataattttatatattttatgtcttatcacagagtatgcagaatgtacttgttatggtgaaaagggtgcccttttctgattagagcacccttttgttgttgaatgtctaagaattcattgacatttgcgattcttagttattcggattaactgtaatagtcaatgtagaagaagtagttccccagccgtaatttactgtagcaggaatgaatatctgataagtatatccaactggtgagctaacattcacatacttcacagtgttaccagtctgaaccaaagtagcgccatcaggcaacttgttaccgttgtattccaagcctgtagttactttgttcaaatccagtgttacatcgccgaacggaccatagaagaaccagtattgtccaggattccaatccggtctgccccactctttcttcgtccattcccaacatcctgagatctgtccgtaagatgttccttcgaatgcaggcttttcagtgtgtctgtgaggaaccattgtccagttaccttcaacccacttgtaagttgccggtacatagttgatactcttcacatagtcgtactcaatagtagtgcttgcaggtttagaaacttccgtatatataatatcgccatctaattcaacatgtggatatatcaacggccatccagctaatttctgtgcttcaagagaagcgtcaacttctgcctgagtcaagaactcttcagttgtgtaagtcttcttagtagatccacccaatctgttatagtatctataagtagccttacctgtatacatagtagtcacagtagtggtagtaaacttaatcgtaccatattctacatccaactgagccggtgtaaccatttcttcgtgaccttgaacatattcgaattcaggagtacaaactctcttccagtaagaatgaacattttcaacccatgaccagctatcttttacaattgcttcgtttctccagtcagtcaacagaccattccattggaagtcagcaacatcaccgccagtcttagcgtctattactgcaataccgctcggcatgttcaagttaacaggacggataaagtcaaccataaattcgttaacagtcacttcgtcgccattgctcatcgtgtagatgtgtgcaacgacagcttgcagaccgtttgcgctgttcaacgcagccttcacagcagcattgctcttatccagggtgatatagttaccatcgatctgaacaccagacattacaggagaagtcaagttaccgttagagtaagtcttgattactttgtaacgagcagattcgcaacccggaagtcctttcacagtgtaagcagagtaagcttctgtcaatgctcttctgaactggcaatcacttgcaggagaagcaactgagttaggtacactcacatttacattgaagtacttgtactcatcaccatctttcgtccagtaaatatcattttcagtagcatccaaagtaagttcaggcaacttcacgtttactgtgaacttgaatgtgatgcttgcaggatattcagaagaagtcagcttgttcttcactgttacagttgcaacaaattgagaaccaccggcaccgatcttacccagttcaccatgattgaatgaccaaacgatcttcttcgttgcagtacctactgaagtatcaccgtcaacgattctcggcagagtcatagtgtgtgacaggttgttcttcttcactacagcaacagcaccggaagcatcatacaagttccagaattcttcgtggctcatgcttgtttccttaccgttagtaataacgcggtaaacattttcacggatgaattgctctgtgatagtgtattcagcagctgtttcagtacatttagctaccaagtcataagccttgtcacctactacgaggtcatcttgcttcgtcacaccaaattcgatcttcacgaatccgcgacgtactacattgcctgcttcgtctaccaattccactttcaggataggagtacgaccgatcgcttctttattgaagccttctgcctggtacaaacctgccgcagcgtcgttacataccacccatttctgctggttggttgaagtttcaccttcagtgatgttgtaatcagaagaagctacagagaacttatatgacaacttatagtcttcgatcgggaattctttgtgattaccgttaccgaagcaagtagccaccaggtctttcaggttgaatacttgatcgtaaggagttgtatagcgaacagcttctgacttacaagcagtgaaagtagttgcataatgagcaccgtcagcacctgaaactaaagtagctttgtcagagatgcgaacgtccggtgcagccagtacgtcatcatagatagatacatacggagaagtaaccactacgttagtctcgtctttgtctacagcatcacccttcagagtagcctgcaaagcaaccatgtttactttatcttctgccggctgagtagaatgaacgttaagacgaagcagtttgaagtccactgttcctgttgcagcgttagcaaccggagtaccgctgatctgaacccactggctggcagccgcgcgagtgttgatcactgtagcgctacgatccaagtagctatagtcagcattgcccaacttgaagctagctgggttgaagtggtagcttgcagttgccaaagcagctgtagaaatactataattcgtaggaatagcagcattttcaccgcttcccatcggagcatatttcaatgagttgaacttgatcgcttccacaccgtctacgatatagtcgggagcaaacgtgatgcttgtcagacggcaagtcattaaagtgtgcaggctcaccaagtcagcgttgatagtaataatctggctgttgatggttctgatgtcaccctgaatacctgagatatccgatttgatagcatccagctcatcgttgatcttatcttcgaggtcagcaatatcctgagctgtagagttcttcagcgcttcaatggcagatttattctcaccgatcaaagctttcagaccgccttcaccgttgatttcatcccaaagtttcttaatctcatcctgtgcagcttcaatagcttcctgcgctgccgcgatatcttccttgttagcgtcagctatatcttttacaccttctgcataaagtttcaaagcgtcgagctgagtctgcaagtctttatctgctgtaatcaacgtttcgatagcatcctgagcatttttgatcgcttcagtattttctttcactgctccgttggcaagattgctcaaacctgtttctataccttcaatctgagcaccgagtgcttttacagcagcttcgtgtactgtcacatccagtttgttgtcaatagcagcctgcattgaatttctcaatgcttcaacctgtgttgcggcttccgctatcgcatctgcttttgcttgcgcagcggcagctttcgcttcttctgccagcgctttcgctgtagcagcatcggcagcagcctggtcgccggcagtttttgcagcttctgcggcagtcttagcttctgcagcagctgtctttgcagcatcagcagcagcctgtgcagcttctgcagcactcttcagcgttgtcagctgagtctgaagatcgccaacggtgcttccgcttttgtcaatttgttcctgcagactcttgatgtcgtcatcgtagtctttacaagaagtaaatgtacctgccgaggacgctatcagcgctccaaacaggacagcatttaaaaactttttgttcataataaaaaacttttaatttataaattaaaaaaataataaaaatataatttctcacttttgattttaaatcccatgtgttgttccgttcatttctcttgcgacctccttttcttaattcattcgacctttatttcccttatataatatactatgaagcatacaggccaaacagcctttacccgttactttctaggtaacgggtaaacctttgtcctgactcccggagagccttctatatgaaaaaccggactatttgacagtgaaacatatttacccctgcttcagacttgcggcagaggggaggaaattctttgtatcttgatcagaggttaacaggtccctaacagaaagaaatccgttgttttatcgtattatttctctttttttagtagtttattataaaaaatatcttttttgtttgcatgttttccaaaatatatccatctttgcaacgctatttagctccgttacctagaaagtaacaggttcattttcaagccactgttcccacaatcgagtgttttacaaaatcaataatctgattattagcttcatcaattttcttattacggaaaggttttagataggtctcggtcaccttgatagacgaatgccccatagcttcggagataatacccgggtgaatttcgcaataataggctgtggtagcccatgtatggcgggcggtgtatgaactcagtctatcgttcagccccaatatttcgcccaagagcgtgagttgctggttgaagctgcgcaatgccaactgatattcccgataggcctccttcgttccctctccacttttcaacagcgggaagagataaggcgaatgagggtcgtggttcatatacttctttaatagtgccatcgcttccggagtgagcgtcacagacaaaggccgtcccgtcttccgcctgcgataagtgatcacgttatcccgtaaatcacttttgcgcagataggccagatcgacaaacggcaaaccacgaagtaaaaacatcagtacgaacaaatcctgtgcgcaccgtacggcagaagatatagcggaagagtgaggtaacttagtgaataccttcttcatatcttcatcacacaatgctctcttatgatccgcacgtgtacccgtatagacggaacggaacaaatgaggcgtataaataaccatccgactattgacggcacgattgtacaccgcacgaaatgtccttaaataagtggagactgtattccaactacatcctcttccacgaagatgtacttcgaaacctttcaaccactccggggtaacctcgtcaaaagaaaaatccccttccccatgataagcaatgatggcattgatactactacgatacacgtgcgcagtaccaaagtttccccccatccgcagctcttcggctacctgcttcataaatgctactacttttaacatcttacttagtattaaagattacacaataaatatacacatatttcagcaactataattgtctgatacgcatatacacaaccgatttccagaataagacactctaaaaatcggtatcgccgaaaaacgaaacaacaaatagggagaaattgagttcatttcttcaaattaccatgaataacttttcacatatagcgacatctattgatcactaaaaaaggacctttcttaaaaaaggaatatttaaacagtgaaagaagggcataattgtatccccactttaaagaaaggcataaaaatgctatcattcacaaatacaggattcctcttttttactattcaaagagtttatcggtcaaatcagaagtataattctttttcactgatcattctgatcgcttactgaagaaaaacagttccgaatgacacttttattttcccggtatttatggatcagttagaagaaaattaagcaaaaatagctttttcaggtcttccttactgacggaaaacaggttggtcggtgaggaaggaggcgttggttttaaaggaacacccccttggtttaaaaccaaaagatacttttttcctttgaaaaggtgtatatttcatgtagtttcatgcaaaaaatgtttttttttcgtatattattgcatttatttatgcagatttttctctagttcgttatttttagagtgaccgtttttcaatgtaatcttaaaaatagcacattcgtccgatatttcgggtttcagaaaagagaaggaggtataaatagaagaagaggatgcatctcacgacacatcctcttcttttttcctgatatcttagtagacttctatttcttagtttttagaagcttccaaagatgctttgcggaattctttcattgctttttcgatttccaaagaagccttacgagcacgagttcctgctgctttgttaccgttttcaatctgagcgttagcatcttttgagaagtcagcatacagagctgctactttttctaccaattctttcataatccttttatttttttcgttaataatgtgtcgcaaaaatacactgtttcccgaaataaacgcataaaaacaatattttttttgaatttatctgcgaaaataagctaaaaaaagggcttttcaccatttttccctacctttgtagccatgaaaacgcttactgatacggattacatacatactttgatagctgaaggagagcatcagcaacaggacttcaaattcgaaatttccgacgcacgcaagattgccaaaacgctgtcggcttttgccaataccgacggaggacggctattgatcggcgtgaaagacaatggacgaatagccggcgtacgatctgaagaggaaaaatatatgattgaagcagccgcacaactttattgcatcccggagatagattatactttacaaacatatatcgtggaaggcaaacaggtattagtagccaccatcgaagagaatccgcacaagcctgtctatgcgaaagacgaaaacggaaagcctctcgcctatctccgcatcaaggatgagaatatactggctacccctatccacctgcgtgtatggcaacaaagtggcagcccgcggggagaactgatccgctatacggaacgcgaacaactcctgctcgacctgctggaacagggaacgctgctttcactcaaccggtattgtcggcagaccggtatttcccgacgtgccgccgaacatctgcttgccaaatttgttcggtatgatatagtagagcccgtattcgaaaatcataaattttatttccgaatgaaaaacgagtgatatattacgatttactcttttcaaaaacctaactatgaactttatcaatgaaataaatgatatactctggacatacatcctgattatcatgttactgggctgtgccgtctggttcagcatccgaacgcggttcgtacagttccgtatgcttcgcgaaatgattgtattactcagcgagtccgccggaaaaggaaaacagggcgagaaacatgtttcatcttttcaggcattcgctattacgattgccagccgtgtgggtacgggcaacttggcaggggtggccaccgccatcgccatcggcggaccgggagctgttttctggatgtgggtgatcgccctgctgggagcttcgagcgcttttatcgaatctaccctggcacagttatataagatacgcgggaaggactcttttgtcggaggcccggcttattatatgaagaagggattgaagcaaccgtggatgggtatgcttttcgctgtgctcatcagcattactttcggttttgctttcaattcggtacagagcaatacgatttgtgctgctgccgaacatgcgttcggattcaatcatacggtgttgggaggagtgcttaccgctctgactcttgtcatcatcttcggtggtatccgccggatagcgcatgtaagcagcattatcgtcccggttatggcattaggatatgtaggactggcactggtcatcgtattacttaatatcacgcatctgccggaagtgatatctctcatcatcagtcatgccttcggctgggaacaggcattgggtggaggtgtcggtatggcgctgatgcagggtatcaagcgcggattattcagcaatgaggccggtatgggttcggctccgaatgcagcagcgacggccaacgtcactcatcctgtcaaacaggggttgatacagacgctggcagtatttaccgatactttattaatttgcacctgtacggcatttatcattcttttcagcggtgctcctttggacggttcctccaatggggtgcaactaacccaacaggcgctcacgaatgagatcggtgcttccggaagcatctttgttgccgtagcgttgttcttcttcgcattcagcagtatcttgggaaattattattacggtgaagcgaatatccgtttcatcaccgcaaagaaatgggtgctccacacctaccggatattggtcagcggcatggtacttttcgggtctgtcgccacactcgatttggtatggagtctggcggacatcacgatggctctgatggctgtctgcaacctgatcgccattatctttctcggaaagtatgccatccgcctgctctcggactatcgtgcccagaagaaagcgggcatccaaagtcctgttttcaggaaagagaccatgccggacatcgaaaaggacttggaatgttggtgaaaaccaacactttttcgtacctttgcggctcattaaaatctccacacacgatttgtaaattgtaaattataaaatagtaaatataacgatgggcttatttggtttattcaaaaagaaatccgatgaaacaaaagtcggcaatgtagaagatttcatatcactgacccgggtttatttccagtcagtcatcgctactaacttaggtattaccaacatccgctttttaccggatgtggctaacttcaaacgtttgttcaagattcctatgcagggaggtaagctgggactggcagaaaagtcagcttcacgcaaaatgctgatgcaggactacggactgaatgaaagtttctttaaggagatcgacagctccgtgaagcgtaattgccgtacgcagaatgatatccagtcgtatctgtttatgtatcaaggtttttccaacgacttgatgatgctgatgggaaatctgatgcaatggaagttccgtatgccgtctatattcaagaaggcgctttacgggatgacgcagaagacggtacacgatgtttgtacgaagacggtgtggaaggctgatgatgtgcacaagactgcggcgactgtccgccaatacaaggaacgcctggggtattcggaacagtggatgacggactatgtatataatatagtgctccttgccaaaaaggaaccgaaaaggaagaacgacgacacggaaacgaaaaaataaggtcgcgtaaatgttagaaaatcgtaaagaatagcatagcaggaaaagcgggagtggcatacttccgctttttttattatctttatgtactttttcttttgccttgatgcaaaagaaaaagtaccaaaaagaaaaaatcaaggctgcgcctgcccggctactccggtctcatttccggctaaagggcagaaactcgcttcgctcaaacagtctgccctttttaacgccgtaaataagacctgcgcttgacgccgggcagtcgaggccgggggaaccttgcggagggataggtcgttactaatcaataaataatataataatatagaggatgcttatgaaacaaaagaaaatgcttgtacttactttttcgcagttgaaacaaatatacacgcaggagatgccggagttggtagagatggcggcggtgagtccgacagtggaggactttaaggctggtctgctaaaacatctggatagttgcgggatggttaatgaggttgcggaggaggcaagggagcaaattcgactcttactccagtatgatggacaggatgttcatgaactgtctacgggacaggatatttcggtacagacgatacggttgctttatcagtttctgacggagaagttggagaatatagagatgccgacggatttgtttgtagaattgttccagttgttcaaacgtttgcagggggaaaatgttccttcgccgtctccgcagcgcatcaagagccggaatgaccggtgggataccggattggatgaggaagtgcgggagatgcgggatgagaataaggaacggatgctgcatctgttgattcagaagattgagaaccggaagtcgaagccttcggtacggttccattttgaggaagggatgagttatgaggagaagtatcagttggtaagcaaatggtggggagatttccgctttcatttgtcgatggctgtgaaaagtccggctgagttgaatcgctttttaggaaattcactttcgtcggagacgatgtatttgctgaatcgggcacgtaaaaagggaatgccgttctttgctacgccttattatttgtcgttgctgaatgtgacggggtatgggtataatgatgaagcgattcggagttatatactttattcgccacgattagtggagacgtatggcaatattcgtgcatgggagaaggaagatattgtggaggcaggaaagccgaatgctgccggatggctcttgccggacggacataatattcaccgacggtatccggaggtggctatccttattcctgatacgatgggacgggcttgtggagggctttgtgcatcttgccagcgtatgtatgactttcagagtgaacggctgaattttgaatttgagacgttacgaccgaaggagtcgtgggacagtaagttgcgacggttgatgacctattttgaacaggatacgcagttacgcgatattctgattacgggaggcgatgcgctgatgagtcagaataagacgttgaagaatatattagaagcggtgtatcgtatggcggtacgcaaacaaagggcgaatcttgaacgtccggaaggtgagaaatatgcggaattgcaacgggtgagactgggttctcgtttattggcttatttgccgatgcgtattaatgacgagttggttgacattttgcgggagtttaaggaaaaggcttcggctgttggcgtcaagcagtttatcattcagactcattttcagacaccgctggaggttacccccgaggctaaagaagcaattcggaagattctttctgccggatggattattacgaaccagttggtatatacggtggctgcctcacgcagaggacatactacgcggcttcgccaggtactcaattcactgggagtggtatgttattatacgttctcggtgaagggatttaatgagaattatgcggtgtttgcccccaacagtcgctcaatgcaggaacagcaggaagagaaaatttacggacagatgactccggaacaggcggaagaattgtataagatactggagaccaaagtcagtgcaggtataaatgaagaaaaaacgaaagaagatgctgacaccgccaaacaaataagacggttcatgagaaagcatcatctgcctttccttgctaccgaccgcagtgtactgaatctgcctgctatcggcaagagtatgactttccaattggtaggattgactgaggaaggcaaacgaattcttcgcttcgaacatgacggtacccgtcaccatagccctattatcgatcagatgggacaaatctatatcgtagagaataaatcactggcagcttatctacgccaactcagcaagatgggggaagacccggaagactacgcttctatctggagctatacaaaaggggaaaccgaacctcgtttcagcctctacgagtatccagatttcccctttcggattacagataaaatgagtaatttagaaataaataataggtattaggtaataggtaataatcgtagctgccggtagctttacccgcatggcatattacttattacctattatttattacctattacttcactctaattaccatattagcaacaattgcagttaaacctccggtggtgattcctgaagagaaaatacttcgaattgcctctggagcttgttttaatacgtccggcattagttccacacccaaacctaaagataggctgactgctaagactaaggtttctttgcggcctatttcctgtgaggaaacgatgcggatacctgctgccgctactgtaccgaacattaataaggtggcgcctcccagtaccggatcgggcatcagagagaatatagctcctacaatggggaataatcccagcagaacgagcatagcggcaatataatagcctacatagcggctggcaactcctgttaattggatgataccgttattctgtgcgaagatggagttcgggaaggagttgaatatacctgctaaaagagagttgaagccatctgccatcacaccgccggaaacacgtttcagataagaatcaccttcaatcggaagtccggaaatcatagagttggctgtcacatctcctgtggcttcaatggcggtgatcagatagaccaagccaatggcaataaatgaagagatattaaaatcaataccgtatttgaaaggttgcgggatgttgaaactcatcagcatctcgacatttagtgcgctcatatttacttttcccagggcgaaagccagtccataacccaggcaaagaccgaacacgatggaactcatgcgcaggtatttgtttttgcagcgattgaaaaacaagacgctcaacagtacgagtgccgcaatggacagattttcccacgaaccgaaggagccgtcgtccatcgcactatatccgccgccacaggaaacgataccgactttgatcagactcaatccgatcagtagtacgacaatgccggacactagcggggtgatgatattacgaagatacttgaaggtacggctgacgaccatttcaataggtgcggcagctatacaggagccgaatatcagcggaagtccgcctactaatccggtcgctatgataggaccgataaaggagaagctggtaccttggatgcagagcagcttcgctcctatcggaccgatacgacggcattgtataaacgtagatacccccgaagcaaaaagggacatagataccagaaagcttgttttttcaacatccagcttcagtgcgctcgcaatgataagaggaggtgtaatgatggctacaaagatagccagcagatgttgcaaggcagcaaacagggcatctttaaatggggggcggtcttctacgccatagatcaaatctgttttcattcgatatttttattcaataattgatgtatatccgttggggaattttgtacttcgaagtttagttcagcgtccacttcaaagccagtgtcggaattacatagaagccgtcacgaccaccgaaattattgctcagttccacttcggaaccgacactcaggttaaagtttttattcactcccttgatgcggttcaggtttacccaaaattgcggttcggagaggaagatggtttttccatacttggtttcttcacgccaccagtcggcaaaaccggagaaggtgagcaaatccttgcaaaagttcatgtaccatgttcctgtcaactggaagttattcggggatgggtgcttctgtatatatttgtacatcgctgtcaatgtgaagcctctggagaaagaagcgttattataggtataggtggctcccgccaggtaagcgttgttgtaggagaatcctttcgccagtccgccattgtattcgagatgggcggagaaaggacctttccagaatttcagttcacgggctatctcccagtaagcggaagcgaccccttcggacgtatagtccatatcgataaagaagtaggtacttccccagttgtcgggatgaaacttctcgacagtggaggtcaacagcgggcgtcctttcaagtctttatcatacagggaacgtccgaaatcataatgtaactgaatgttttgtgcctgcaattccggtacggcagaaaacagcatacataggaaaagagcagaaatgatctttttcatgacaaatgtgtttaaatgaaggtgcaaaaatagctaaacctatacatatattcacattccgacactaaaattttaatccagactattatttcctttatcccaccacaatcgggttcctccatgatcgggtccgcccaaagcctccacaagagccaggtattgctctctgtcttcggtttgcagcgtaccgggaaagttgaggcgacgtaccattgtctctgtgtcaatacatccgttcttgctatggttgaagcgtaccggaaacaggcggggatatcccgtgcggcgctgttccgcccatgcctcgcaaccttccgggaataaggcaatccatttctgcgtaatgatcttttccagctttatttccttgtcgtctgcgggattccatttaggagaaacccggcaacgggcaggaatgttattttcggagtcttgtgtgtcgatgaaatcggcagccgtccgctcactgttcagataatcgtccatctgataaatgccgtgttgatgaagagacgcctttattccgttcagataacattcttcttcatcttccggaatccatccgcgcaaagcagcttcggcacggagaaaccagacttcggcggagctcatcaaaggggcatccgtactctgatcgacggacaatttggataagcctgcataatgattgtgcgcaaagcaggttccctgacggatgccgcggtactctcctgcatacgccttgtcggtacaggtttcaaagtaaactttcaatcggggatcatcgtagcctgtcagaatagattccattgcagcgctcatataagtttcattccatacccggttgagctctcccaacgggttcgtgaatccggatttcgtagagactgctacccgttcagcttccgcttcaaagacaccaaattcattttccagtcccttccggaactcggcgcgtgccttatccggatcaaccgcagaaatacgcattgccagacgcatacgcaacgaattggcaaacttgatccaggaggaatattgaccatccagcaagatatcaaagcgggtgaatccattggagtcgggcttcttgtctatataatcggcaagagagacaacagccgaatcgagttcattaaagaactcatagtagacttctttctgcgtatcagggcgatattgattctgggcattcgcgaaattcttataaataacagggccgtaataatctgtcacacggtgcatgacttccactttcagcactttggtaatgccgaacaaggcaggttccgtatcacgggtggcattctccgactggtagatttgtggaaagatatacgaatacatatgtgtccacatggcgctgttccagccatcctgcatattataatccgagttatgcgtacctccgttcaagggtttgccgtcgtgcatataaccggagaacatatccgcgttcagattctgtatcaactggaaaggccagttcttgcctttaccgaaatcgtagttaaaatagatgccttgctggataatccccagacgaataccgaagccattgtcgtcaatcagcaaatcatcgtccgtaattcccgactggtcggtattaaattcacggaattttcctgtacaaccaacagaaaacagcagcatccccagcaagtatatataaatatgttttttcttcatcatcttccctcctgctcttaaaattcacatgtcaaagtaaagcccagactgcgggtggtaggcataccgaacacttcaattccctgattgtcattgcctgtagaaagtaccagatcgggatcgaaaggcgctttcttgtacagaaaacaaaggttgcgggctacaaaagaaagttgcaggtctttcagacaattcgttttctgtacccattttcgggggaagctataactcagcgatacttcccgcagacggaggttggtagcgtcatacatatagtattccgtcacgccggcgcgtccgcccactacatttttatagaatcctttgacatcacttatttgccggccttccagcgaaacatatcctttatcacgggcttgcgccgtcgctttcgatactccatagaggtccatctccgcctgggtctgcgaaaggacttcacctccatagcgccagtcaagcaggaagtaaaggctgaaacctttgtaggagaaggaatgattccaccccaacataaagaccggattggcattgcccacctttacagtatttccatcgccttctaccaacggaagtcctttatagtctccgtccgttccataaacgatgtgcccttcttcatcacgtataaaggctttaccgtaaatatcgccgatagagccgcctttcactagtttcatcgcataactggacgagaagctggtaggtccgtaaacaaattctttcagttcttcatggagttctacaatcttgttcttattggcagagaagttgagagaggtcttccacgtgaagtcgggggtcagtaccggagtggcatccagcgttatctcccatccctgattccggatatctccggcgttgacgtatcgataggcatacttatcgcccgcaagcgcaggcagtttgaaaaactgctcatacgtgtcggtatggtaataggtcaaatttaatccgaggcggtgctgcaaaaacttccactctatacccaattcaacggaatgcgtcatctccggtttcatctcggcgaaaggggccgcatcgcttgccagtatctctccaccggcagtcacatacgaaacaggataggtgataaagggaggcaccccattgccaacgatactataagcaccgcgcaacttcgagaacgaaacccattcgggcatctttacccacttatccggaaggaaagagacaccgacggaaggataaaagaatcctttcttctcgtacttcgtgtaagccagcgtagacgaccagtcgttacgtgcggtcagatcaaggaagactccttctttatagccaatctgtgccgtcgcaaagaccgattgcagttggtaatgggcatctattttctgatcgatactggcagaactgctcatcacgatattggcaagattaaacacattggcatatttcaacgaagcattcttcgaatcaatgcgagtagagttagtgattctgtcattgatactgccaccaatggctacatccaatgtgaagtcattcagttgcttcttgaccatcgccatcacatctccgtacatctgcgtttcctgataatccatttcaatatagcgcccgttcatcccacagagtgccgtagcggtggaggcataaaatttctgacgcagtttatcggctgagtaatccagattgccacgagcctgaagtgtcagccaatcagtgactttcaaattggcagaaagggaaaggagcaggcggatacgtgcatccttactctgtatgcggttttgtatccaatacggattctgttcaaagtcttcggtaaaagtatgccagttttgtgtattcagctttctgtcctcgtcataacgctcatagttatctttataataagccaagtcctcgccacgaggaaagcggtatagacctaccagcggattcatataaaagcctcccgatacgggtttattcttcactgtctgcttcatgacattcacgttaccgtccagtttcagcctgctgttgaagaggacggcggtctctctcagattgatattgtgtttggagagtttattttcattcagaatgccgcgaccggtggtgttggcataggagaaatatgtttgcagcttgtcatttccggagttgacggatacagaagtgatcgacgtcagtccggtacggaaaaagtcacccaaattatcgtaaaccgtcagattttctttttctccccaactgtctgttacatcatttactccgtagctgttctgcatttcgggcagagagaaagccttttcaaaagtcagtccggtagagaaatgaatatccctccgtcctacggtatttcctttctttgtagtaataagaatgactccgttggccgcctggctaccatacaaggctgcggcaggagctcctttcaggatgctgatactttccacatcctccggattcagatttgagataccgttgcctccgtccctgttaccggcatttgccgtaccgccgatagccgaataagcctgttccgaagtagaatttaacatgggaacaccatctatcacgtacagaggctgattatcaccggccaccgatcgtaccccacggatactgactttcgccgatccgcccatgccggaagagttcttgctgacctgcacaccggctgcctttcctgccaaagccgtgatcatattcacttctttcacacgattcagttcttctcccctcaccttttgcatggcataggccaaagaggattctttcttttcaagccccaaagcagttacaatcacgtggtcaagcagcagaatattttctttcagacatatttcaagcattgacctaccctttacactgacttcctgagactcgtaacctacgaaagaaatttgcagaacagcactatccggaacggataaaaagaaattcccctccacatctgtcactgttccattcgctccgcctttctctctgattgtcgctccgataagtggttcaccataggtatcgatgacccgcccccttaccgtaaaactggcagaggaaactttcacacattctttcgaccccggccgtgaagcataacaatcttcttcaaagaaagctaacaagcttataaaacagcaacttataattattcttgttttcaacagcatttcaataagttgtttttcaccatctccgtgcaaaaatagccaaatatttttaaatttgtttttttccgtaactattttgagggaaaagaatagattcgttatttttgtaggaaattacatcaatatggagattgaaatcgaaaaacatcctttagaaccctttctcccgccaaaagcaaagctgctgatgctgggaagttttccgccacaaagaaaacggtggtcgatggatttttattatccgaacctgaacaatgatatgtggcgcattgtcggactcttgtttttcggagacaaagatcactttctgaacgatacgcggaaagcattctgccgggaagagattattgacttcctgaatgaaaaaggaatcgccctgttcgatacagcctcatctatccggcgtttgcaggataatgcttcggacaaatttctggaagtggtgcagccgacggacattgctgcattactccgccaactgcccgaatgcagagcaatcgtcaccaccggacagaaggcaacggatacgctccgtgcacaactggaagtggaagaaccgaaagtaggagactatgccgaatttgtgtttgaaggacgggcgatgagactctaccggatgccttcttcctcacgggcgtacccgcttgcattagataaaaaagccgccgcctatcggattatgtatcaggatttgcagatggtaatttaggtaataggtattaagtaataataatcgataaatagtatatagtatgacacctttatttttgcaatatccggcgtgcagtacatgccagaaagctaagaaatggctaatcgaaaataacattgagtacactaaccggctcattgtggaagataaccctacggtggaagagttgaaagcatggattccacgaagtggattgccaataaagaaattcttcaacacaagcggtttggtatataaagaactgaaactgagcgagaagcttccttccatgactgaggaagaacaaatcgcattgctggcaacaaacggtaagctggtgaaacgcccgttagtagtgacagacagcttcgttctggtaggttttaagcccgatgaatgggaaaaattaaaataattggaaatttatttaccctaatatttgctggttcggaagtttatactacctttgcagccgcaaacacgggagtagctcagttggtagagcaccggtctccaaaaccgggtgtcgggagttcgagcctctcctcccgtgcaaggtcaaatagctgtaagtataatgcttacagctatttttatatataaaaagcggcttccaatttaatatggaagccgctttcattcgaaagttgtgtttttaaaggcgatgtttcctcaagaggaaagcacttttctttattcgttcactcaaatcgagtaaactatctgataataaatcaatttcatcgtcagtaaaggtagcaaccttgttattaacatgataaccattcatacgctgactgaaccaagaacgcgacttattaaaatattcttcagcaatataagaccaagtaatagccggaacaatatctttcaatgcttgcttgaaatcatattcatcaatcaacgcttgtgactggtctattgtttgctgagctttattggaaagaatctcagcaaattcacgtttttcctcttccgttttccctgataaggtatgagctattttaccctggaactgtctccgttgttcatctgtctccagctggagaaattcattcaacaaattatttatctctctatctgttcccataacaaacatttttatatgattgagtttttaaagcaccccctcaatacatgaggaggttaatgttagtctttcagttgtttgaggagttcgatcagcttatccagttgaatatcgatcaacctctctaactctctttgtgggtatccttgcttcaacaattcctccacactttgagcatagaactgcaagcatcgcttaacatgctctatgtgagcctttagctcttcctgattgtcaaacatcgctttaaaaacacagtacaaacataataaacatttgtttatcagcaaaactattgcagataaatccgtcctttaaattgattctttaacacttagataccttcttatagcgtctatacactctttcctaattgtaatcgttaatcacttatggttttctcctgcttcatccctttggcagtttctaccaaacggataaattctcttctgtatcctttttcatcattatccaatccctgtttggcaaggccgatcactttatcatagtttgcctctcctttaaagtcagagtcccgaagcagctgaccgaacatagccacggcagaagcgaagcggaaatcggaagaaacattatttcctttattatccacaaagggaacttccatctttttgctgacgtccttgtccggagctttatagcgcagtttcacggtcagcaattcattagagccggtcggctgcaccgtctctttttgtttcttctgatatttcagatcatctatctttcctacgtagtcattctttacgcctacgggaatcacttcatagaaagctgtcaccgtatgtccggctcccaattctccggcatctttggcgtcattattaaagtcttcgtctttcagcaaacggctctcataaccaaccaaacgatatgcctgcacctgagccggattaaattccacttgcagttttacgtccttcgccaccgtatgaagcgtagcgccaaactcacccaccaggacacgattggcttcctgcaaattatcgatataagcatgatttccatttcctttttctgctaaagcctgacctttattgtctttatagttacccattccataacctagcacactcaggaatactccgctcttacgttccttctctatcaactgttccaaaccttccacagaagaaacacctacattgaaatctccatcggaacaaaggatgatccgattgtttcctttaggaaggaagttctgtttagccactttataagccagttggatacctgcgccgccggccgtagagccaccggatgtcagttcgtctatcgcatcacgtattttctgtttgtcactgcccggagtagattccagttttacgctggcgttgcctgcatacacaacgatggcaactttatctttttcacgcaggttattaactaatagcttcagagatgacttcaccaaatccagacgggtaggtccccacatagaaccggatacatcaatcaagaataccagattagattccggaagtttgtcagtcggaatctcccttgctttcagtccgatacgtaccagacgatgatcagcattccaggggcaaacacctgcctccattgtaatcttcaccggatcacttccggtcggcttcgcataatcgtaggagaaataattcactaactcttccgtacggatagcatcggccaccggcaaggtaccgctgttgatcatacgacgcatattactgtaagaagcggcatccacatcaatagagaaagtagaaagcggagattctcctacctgcttaaaaccattttcactgatcgatttatattcttccgtatttactgcatccatacgtacggacgggtgtctgagacttgccagattgacggttgatatggcgccggtaacagctacctttcgctggctgccgtatccgacgacaacacattcttccaaaacatcagaactagccataaggcttacgtccatctttgcagagaatatgattttttccactttctcaaaaccaatatagctgaagataagagtttcccccttgtttgcttcaatcctgtactgcccttgtaggttcgtaacagctccacgggatgttcccttgaccgtcaccgcacatcctaccaacggcgaaccgtctgatccgtccgtcaccgttccctttacgatcaaaggctgtgcccataccgtagtacccaatgtagtaatcactaacatcaccgtgagcatcattgctctgagttgatttgtcttcataactttatctttttaaaatgttacaattaatccgcttttactatagagatgcagattccacacggattccataaaccaacagaagttttttttattttcattgaaaatagcacgcttttcaaaataatccttcattcttttgctgcttctaagatgatgtgtatatttgcgaacaataaacattcataaacatgaaacatgaagtcgacggaaggcgggaaatagcctcacgaaacaccgcttgggctaacattatcgcccgtaaactaaccggttggggcatcactcccaaccagatttcaataatgagtgtattcttcgctttggctggttgccttctgctgacgggcactgttatctatcccgatttcaataaatacgtcgcttatattctgttcatcgtctgtatgcagtcgcggttactatgcaatctgtttgacggaatggtggctatagaaggaggaaagaaaagtgccaacggagatttatacaatgatatgcccgaccgattcgccgatgccttgtttatcattcctgtaggctatgtagccggaggattcgggatagaactgggatggcttgccgccctgcttgccgtaatgaccgcttatttccgctggataggagcttacaagacacaacagcatttctttaacggcccgatggcgaagcaacatcgcatggctttactgacactgtgctttgtgattgccacctgcaccattcactggggatatgaacagatcgtgtgcctcattactcttatactaatgaatatcggtctgatcgccactcttatacaccgtttatatcttatgtctcacacaaacaacgaagcgaaatgaaacaactgttggacaaattattccctacgctaagcgatgagttgattattgtaatcacccttattatctgtttgctggtgacggcaagcatcgccctctttctggtaaaaaagctgtcgccgaaaaccaatatcagcgaactggttgcccgtacccgctcatggtggattatggcggcaatgtttatcggtgccgttttcatcagctacgacatttcttatttttttcttgcatttctctcttttatagcgttcagagaactttattcggtattaggattcagagaggcagaccgccgtgcactgttctggggcatattggctattcctatccaatactatcttgcttatatcgcgtggtatggagcatacatcatattcatccccgtagttatgttcctgttattgccattacgactggtattgaaaggcgatacacacggaatcactaaatccatcgctttgctgcaatggattctgatgctttctgtatttggtatcagccacctcgcttatcttctctcgttacccgaattgccgggcttcaatgcgggaggacgcggactgctgatgttcctcgtgttccttacagaaatcaacgatatcatgcagttcgtctggggaaaactcttcggacgtcacaaaattctgcccaaagtgagtcccaacaaaacatgggaaggctttttgggaggtgtcgtcagcactacggttataggatactttctgggattcctcactccgctctccacgcccaacgtaattctggtcagcgccctcattgccattgccggatttgcgggagatgtagtcatctcggccatcaaacgtgataaaggcatcaaagacatgggagatagcatccccggtcatggtggagtattcgaccgcatagactctctgtcctatacagctccggtgttcttccacctcgtttattacatagcttattagccggcaaactatgaaaaaaagattcatgcagtctgccatgatgcagatactatataaaggtatattccggtggtttctgaaactgatcgtgggagtccagttccccgatacccgattcctccgaaaggaaggacaattcatcatccttgccaatcacaacagccatctggatacactcagcctgctttcttccctacccggcaaccttttgtggaaaataaaacccgtagccgcggaagattacttcggaagaacccggtttcaggccgctttcagcaattacttcatcaacacccttctcatcagaagaaaaggagaaaaggactcggagcacgacccactccggaaaatgctcgatgccatcgatgaaggatactcgctgattctttttcccgaaggtacaagagggaagcccgaacaaatgggaaaaataaagtccggcatagcccgtatcttgtctctgcgaccggaactgaaatatataccggttttcatgaccggcatgggacgttcactccccaagggagaattaatcttattgccttacaaggcatccatcttttacggaacgcctgccgtagccggaagcacagacgttcatgagattctaaaacagataacggatgattttgagatgatgaaagataaatatcaggtagtaacagaagacgacgaatagagaaagtgctgttcaatgtacgaaacatatcgaagctatcggacgaggaactactgacccattatataaagtccggggatacggaatatttcggtgaactatacaaccgttatatcccgctgacgtacggactttgcctgaaatatctgcaagatgaagaccaagctcaggaagcggtgatgcagatgtttgaagacctgttacctaaaatcatcaattatgagataaaagcattcaagccgtggctctatcgggtggcgaagaaccattgcctgcaactgttacgaaaggaaaacaaagaaattccgctggattataccattaatattatggaatccgacgaatttctgcatctattaagtgaagaggaaagttcggaagagcagctgaaagcattgcaccactgtctggaaaagctgcccgaagaacaaaggaccagcattacacgtttcttcctggaagaaatgtcgtatgcagatattgtcgaacaaaccggatttactctgaataacgtgaaaagctatatccagaacggaaagcgaaacttgaaaatttgtattaagaaacaagccctatgaaactattggactacatacgaggactccgcaaagggaaagaggcacatcgactggaaaaagagtcgatgaaagacccttttctggctgacgcgatggatgggtaccaccaagtagaaggggaccacgaagaacagattaataaattgcggatgaaggtaaacgcccattcggcaaagaaaagaaatacgtatgccgtcacctggagcattgccgcctgtctgattataggaatcggaatcagcagttacttcctgtttctgaaacagaatgttggagaggatgtgtttatagctaaggagcagccctctgccactgcaactgttcctgctcacaaagaagacacttccctatccgctccaaagatggaaccggattccggtcgcccttctgccacaaaggaaacggttggaaaagatataattgccaaatcaaggcaggattctccatcccaaagtacaccttcgggggctccttccgcaacggttcctaaagcagtggcttctaaagcagcgactccccaagcaacgcctgccggaactccgataatggaagaaatggttactccggcagaagagctggaagaagcggctatcacaacggttacagatacttctttcctggatgccaacaggaaaaagatgaaagcagctcaattgaccacccaaatgaacaacatgatcaaagggaaagtgacggacgacaaaggagaaccactcatcggagctaacgtcacttataaaggagcaacttatggagcgataacggatatcaacggagaattctccttgcccaaaaaggaaggtaatgaaatattaactgcacattatattggctataatccggttagtataccggcagacaccagtaagaatatgcttatagccatgagtgaaaataaaacaacactggatgaagtcgtagtaacaggatatggcgcacagaaaaagatagctgtgacaggagccatttctgccgtatccatcaaagatttgaaaaaagcttcgggtgcattgcagaaatcagatacattaaaagatgctgctatctcccaaaaggccgatagtttacaggggcttgtcgttccggagcccgtgacaggaatgaagcaatataaaaagtatctgaaaaagaatttgatataccctgcggacgacgcttgcgcagaagtcaaaggcaaagttaccttgactttctttgttagcaaagaagggcgtccctttgacatcaaagtcaaggaaagcctttgtcagtctttggataaggaagccatacgcctgattcaagaaggtccggactggacttacggaaaccaatcggcagaaatcacagtgaaattccacaagtaatgtggtcggcagagttcttatgagagctgactttttatgaattagctttcttatgaatgatgaatacaacaagaattatactcactttaataagaaaaagttctcaagcccatgagaaaagattctcataggcttgagaattatttctcatcgcaatgagtattttttctcatagccttgagaattttttctcattacgatgagaatggtttgagaataataagcgtttgtcagtcgttataagattctaaatccaagttcctttacgccacaggaattccaacggtccttgcttatgacgggcaagccaccagcggctgaatatcaactgaatagtgaagataagcaatgcaatcagcaggcttcccgttgctcccgcatacttgtacattgacaatccgaatccgtaatagatggttactcccatgattgactgggaaatatagtttgtcagactcatgcggccgtaaggaatcagcagactttgccagctatatcctgtatccttcttaaaccaaagcaaggtaaagacagaaacaagaatgaccataaaggcaaagttggcataagacggaacagcaatcttatacggaaccattatagacgggtttgtaatcaaagcgggtataaaagttttcaggcaatagagagggataaatgcaaggatggcacctgtcagcatcttcttccagaaacgcaaagactcttcgcttttcataaaatacttccggcgtcctaaaagcattccgaacatgaataaagctgccgtctggaacaggcgaccgttttctacttgccagatattgctatacatctgtccgtcagtgatattggaacggagtacttcaaagaaactgccattggatgtcacttcctgagcaagtttataataaggaataaaatgccctgttgacggtacatactccggattgatcattgcatagatggcacgcccccattcataaggttgcaaaagtaagatggcagcaatccaaaagaccgtcttatctttgagcttgcaaacaggaatcaaggcaaagccgactactgcataaagcaaaagaatatccccgttgtagaacaaggcatgtaactgtgcaaacaggaaaagcaggcacatccgccacgcaaatcgtccacggaaatctgttccgcgcttttccgcattatgaaactggatatagaaactaaatccgaacaacaaagagaacgtagcgtatgccttccctgcaaacaggaagaacatggtatcccacgcatacttatctatagtctgcaaccatgccggcaacgtataatccagcggtaaaaacagattatagtgttcaaggttgtgcaacaatacaatagccagcagggcaaatccgcgcagagcatctactactccaagccgttcagtcgttttaagtgtttgagtcatcagatatgtttattcatgattactaattaggcagtaaaaatagtagaaatatctgaagtacaaaagtttataaatattaattatatcaactcatagcttgccatttgtatcggcatatccagattatgaagcactttttccagcaaaataccttcccggttgtcatactcatagccgaaagttgcccgaatcccttgcagaataaactgggtagcacgatccaacgccatcggaagactgtctccctgcatcaaggagccggtgatcacacttgtgaatgtatcccctgtacccggatagtgggcaggcagataagggcaagtcactttccagtagcgatttccctgacgattgtaggcatatacggaagtcttatgaagctcatcgtgcaccggaacactggtgataataaccacctgcggacctttgtcggacaggagacggagatattctttcagttcctcatccgtactatccgctttatacggttcgtccagcaaataaaacagttctgtcagattcggtgtgatcacatccgctttggttatcagatgacgcatttctttcaccatctccatatcaaagttggtataaagccggccgttatcacccagcaccggatcggctactatcagactatccggctgacggaaatccttgatgaaatcggaaacaatctgaatctgccgcggggaacccagataaccggtataaatagcgtcaaactgaacttccagcttcttccattcggctatgatcttcggcatttcatccgtcaggtccagaaaggagaagccgggatactgcgtatggttggacaataccgccgtaggaagcggacaaacctgaaaacccatagaggataagataggaataacgactgtcagagaaacacgtcccatccccgaaaggtcatgaacggcagctatcttctttactttatttgcatacatactgtttttattatttagacgattatagtgagactgcctaaaaagtcggtactatctctattctcctccttcgggaaggaggagtacccgtagggggaggtggtaggtaagcatataacatattcattattattaatttatgtattcgcctaccacctcggtcttcgaccactcctccttccagaaggaggagaatgtggatactaccgactttttaatctgcccctaagcttctattgttttaaatccaaatttattttagagtaataaagcggagttacgtcaatatgaccaaaacttcccgtgctccatgcgctcccatgaccaatgcctgttcgatgtccgccgtctttgacgggccggaaataaaggtaccgaactgatattcctgtccgtccagtttgcgataagcgtcgtacatggtatccacaatcttattccggtcgatcagaatcaccagtttctccgaaataaaataaatcgctttgtacttcacggtttgcggtatccagacagcgccgttctccgctactccgatctctccccgaataacggctacctcggttccgtccagttctttcgggtcgtccaccatatccggattgaaagttgcgcaagatatatccggcaatacggaagcgatgcgcatcgcatccggatacgtccggcgaatgacggcattcacatcttcgccttcgcccaataccactgccgtaccgcctaccgcacggctgatagcgcaaaactgctctattttgtccggatacgtcaaacgtttcatatctgctatatccggtttttcgtagcgtgtctgcgtatgcttacggatgctcgccaatatttcttctctgctgctcattttgattcctcctttccctgtacctcgtttttcttccacatttcgttgaatgactctttggcaaattccggcagttcgcgtcctttgccccaatcatcaaagtcattgtatttcataaagcgtggcaggccgtttaccatcggagccgcccacagagccgcattgaacaatgcaggacgctccatcaggaacttcatgccaccggacattatcttctttccggtattcgcctttcccaatccgtcaaggtcttgacgccacttgtaaatctgttctgccaaatccacttttaccggacagacatcagaacaggacatacacaaggagcaggcggaaagattatcataatacttctccggatcatgagccatccccagattgataccgatagggccgggtataaagtaagtgtaggagtatcctccacttcggcgatagaccggacaggtattcatacaggcaccgcaacggatacagtttaatgtcttgatatggtcgggcttggaaaggatcgtactccggccgttatccacaataataatatgatattcaccaccttcacgcggacggcgataatgagaagtataggtagtcaccggctgtccggttgccgaacgtgccagcagacgggtgaacacacccagcgcatccagatccggcacgatcttctccatgccgaaagcggctatattcaacttcggataagaagtacccatatcggcattcccttcattggtgcagactacaatgtctccggtagaggctacggcaaagttggcgcccgtcatggcggcttccgcattcaaaaaaaggtggcgcagattcttgcgtgcggcatgagtaaggtaggtcgggtcgaagtttcctttttccgtacccatctccttttcaaacagttctcccacttgctcccgtttgatgtggatagcaggaagaacgatatggctcggttcgagatgcatcaattgcagaatacgctcgcccaagtcggactctaccacgtctattccgcgttccatcaagaagggattcaacccgcactcttcggcaagcatcgacttgctcttgatgaaatgatgtacattatgctcattcagtatttcgtacacaatggcacaatattcgtccgcatcttttgcccagtgcacaatcgctccgttggcagtggcgttcttttcaaactcttgcaagagctcttcgaggtggctgttggaatacagtttcagttcacaggccttgttgcgaagctcttcccattcgggaacttccttgctcatcttgtcccttttggctcggaccatccaaagggtttcgttatgccatgctgccatcttgctgtcctgcaagaacttttcggcagcctttgaatgtttggtactcatgattgcgacgctaaaatttcgacaatgtggataatttgaatcggcagatgctcccgtttgatcacaccttgcatgtgcatcaggcaggaactgtccgctccgacaatgtattcggctccggtagccatgtggtctttcaccttatcacgccccatgcagacggacaccgcctgctcttctacggcaaacataccgccaaacccgcaacattcgtctatatggctgggctcgaaaacttcgatgccttcgaccatatcgagcagatcgcgcaatttattgtaataagggatatttaactcgctgggagcggaaatcaagagctcgcgcacaccgtggcaactgttgtggatgctgactttatgcgggaagcgtgcgggtatcttcgtcggtttaagcacatcatggataaactcgcaaaggtcgtaaatcttccccgcactctggcagacatgcccttctttttcaaggataccgggatgattctctttcacaaatgccacacaactggcggaagggccgacaatgtaatcgtactcccggaacagatcgtcaaaacggagcgccagcttcatcgattcatcttcaaaaccggcattcgccatcggttgtccgcaacaggtctgatccaacggataatcgacatctactcctaaacttttcaatagtttatacgatgctacccccacattgggatagatagcattgatataacaaggaataaataaacctactttcataattatattacgtaaaatttagatgcatcctctgctactacatccgttttatcagcttaccggatgtcgattagtttgtgtgtttgcaggcttagtctccatttaggatgtcgcattacacagtccactgtcaaagcagtgttattacaagaacaaggctggaggaaaaaatgttcagcgggaagcagttcataaatacttatatcttgcccttcgtagacaactttcacttcatccatccgagtaatccctaatttgacaccctgcttgggcgaacaggtcacccagtcgatggactccggcagcggtcgcgtgccgttggtttcgatacaaacgtatttacccgctttgtgcagacggtcgatcagtgcgtcgtctatccagagcgaaggttctccccctgtgaggataacggtaacggcgggatatttgctgacttcggctatgatttcgtcgtcagtcatcaaggtgcctgcttcgtgttgtgtgtcgcaaaagctgcatttcaggttgcatccggaaaagcggatgaagactgccggagtacctgtgtggtagccttcaccctgtagactgtaaaagatttcattaatctttctcatcattcgagctgttctaaaatttctattgtctattctgtctctcctgctaccggagttttctcgtttgccgcagcatctttctcgtagatgacgatgtttccttcggactcctgcacttctactttatagcattgcggaatctgcttgcaaacccatcgggcaatgttttctgctgtcggattgaatggaagtacttcattcagattctgatggtccagtttctccgtgaccacttctttgattcgggtgaaatccaccaccattccttcggagttgagccgtgaggaacggcaatagacagtgataatccagttgtgaccgtgtagactggcgcatttactgcgatacggaagtaccagcttgtgagaagctgatatctccatgcgtttgattactgtaaacatggctgtatatatttaatatagttacaagcatctaatgtcacctcgatgcaaggacaaaggtaatataaaaagagctttcatccagcaaacccgattattttttcctgtttttacactatctttgccgaatgaaaactctttatattgttttaggaagcatatctctcggactcggcattctcggcatctttctgccgttactgcccactaccccttttctgttactgaccgccgcactttatttcaaagggtcgccacgattatataactggttgctgaatcaccggcacttcggtccatacatccgcaatttccgggaaaacaaggcaataccgctccgcgccaagattatctcacttgtgctgatgtggggaacgatgctctattgcatcttcttcctgattccgttcctatgggtgaaaattcttctgggactgatagcggcaggagtcacctatcatattctttctttcaagacattgaaatagttcgaaagtccctgacgggcgtcggcaagtttgtcctcccaatgttgcacggagttttgtccgataatgtcggtcacgtacttcacagaaacaaaaggaatctctttggaacggcagacgaaggcttgcgcatacgcctccaggtcgacgacatctccgcttacgtgagtcagctccgtcaggaaaccatctcccgtattacagattccctcttccgtccaatgcttgcagaagccttttgtttcgagcaaagcggaagaatctatttcgcattccaaacctagtccggctagtttctgcatatcgcggtctataaatttgcggcagacaaagatatcccctacctgatgattgactgttccggcacttccgagattcaaaacgagatcgggctgcacctggcggatcgcttctgccagatgaaaggcggacttcacttttccgatccccgtacggatgtaataaggctctacatcgggccactttatctctacaaattcgccttgaacggcatacgttactaatattttcagcataagttttctgtataaaaagacattaccagatgcaaaaataagcatttatactcgaaatggtcagagattgttctaaaatgatcagtttttaatgatggttgctttcggcgttcgctaactttgcctacataacttaaaaacaaaatatcatgactcaaaactctattgcggacaaccggatggtctggctggatgttgtccgttgcgtcgccatgctaatggtaatcggcgtacattgcattgaccctttttacatttctcctacgatgcgcgttattcccgagtacacacattgggcagccatctacggttcgcttctccgtccttcggttcccttattcgtaatgatgaccggattactgctgctaccggtcaggcaacagcctttaggcactttttataagaagcgtatcttccgcgtacttttcccgttcctcatctggtcggtactttacagtatgttcccctggttcacggggctgctggggctgcccaaagaaattatcggcgacttcttctgctatactcagggacatgagtcgcaaagcctcatcgattctctgaaagatgtagccatgataccgttcaacttcagccataaggagaaccatatgtggtatatctatctgctcatcggattgtatctttatatgcctttcttctctgcatgggtagagcgggcaagcaataaaaccaaacaaatattccttttcatctggattgtttccctgtttatcccgtatatccgcgaatatgtagccaatatgcttttcgaccggagcggctatgtattcggcactgacacgtggaacgagttcagtatgttctactactttgccggattcaacggctacctgctgttgggacattatctgaaagaaggcggcaacggaaatgcactaaaaattttctggccttttagtggttcgccaaaagatgatcgtcttactaatgattggagtgtttggaagacattcctcatttgtgccgtgatgtttgccattggatattatgtgacgtacacagggttcagcacaactgccgccaacccgaatgctacggagactgagatggaactttacttcacattctgtagtccgaacgtgttgctgatgactttagccatgttcctgatgttgcagaaagtagtaatcaatacacctgtcatcgtcaaagcattagccaacatgaccaaatgcggttttggaatttatatggtacactactttgtagtaggtccgttctttctgctgataggtccttcggaaattccaattccgttgcaggttccgttgatggcagtttgtattttcctttgcagctgggcattcaccgcactactatataagctgatgcctcacaaggcaaagtatataatgggataaagaaactaaaaaagatatacgatgaaaattaaagttggtcttattggattcggtcgaatgggacgattttatttgaaagaaatgcagaaaagcggaagatgggaagtcgcatacatttgcgacattaatcccgactgccgcgaattggcaaagcaattatctcccgaatcgaaaatactcgaaaacgaacaggaaatgttcgatgatgaaagtgtgcaggtagtgggactcttcgcgttggcagactcaaggcttgaccggattgaaaaggctatcaaatacgggaaacatatcatctccgagaaaccggtatcagacaccatagacaaagaatggaaagtagtggacatcacggagaaagccagttgtttttcaaccgtcaatttgtatctccgcaacgcctggtatcatcaggctatcaaacagtttatcaatcagggcgagatcggcgaacttgccattctgcgaatctgccacatgactccgggtctcgcaccgggcgaaggtcacgaatatgaaggccccgccttccatgactgcggaatgcattatgtagacattgcacgctggtatgccggatgcgaatacaagacatggcatgcacagggcgtcaatatgtggagttataaagacccttggtgggtacagtgtcacgggacattccagaacggtgttgtttttgatatcactcaggggtttgtgtacggacaattatccaaagatcagactcataactcatacgtggatatcatcggtaccaaaggtatcgcccgaatgacacatgacttcaagacagctgtcgtcgatctgcgtggagtgacacagacccatcatatagagaagccgttcggtggaaaaaacatcgatgtgctgtgcgacttattcgccgactccatagagaccggaatcagaaatcccaaactaccgctcatacgtgattcagccatcgcatcggaatatgcatggacctttttgcacgatgcccgcacgcatgaccttcctgccatcggtgaattgaaaacacttgagcaaatatgggaaagaagaagaaatatgaaaaatggatacggattactccgaaaaccataacgaacattcaataaaacaagaaactgaaatcaattattaactcttaaaaataaaaccatgtcagacttttcaagaagaaaatttcttaaaacgggagccgctgctttagcaggaatcaccattgctcccagttctattttaggtatgagccacgggcacgtttcaccaaccgacaaactgaacctcgcagccgtaggtatcggcggtatgggccatgccaacatcaacaacgtgaagggcaccgaaaacatcgtagccctttgtgacgtagactggaaatatgccaaaggcgtattcgatgaattcccgaatgcgaagaaatactgggattaccgcaagatgtacgatgaaatgggcaaatccattgacggcgtaatcattgctaccgccgaccatactcatgccatcatcacggcagacgccatgacaatgggcaagcacgtatactgccagaaaccgttgactcactccgtttacgaatcccgtttgctgaccaagctggccgcctctaccggagtagttactcaaatgggtaatcagggagcatcgggcgaaggtaccgacctggtttgcgaatggatatggaatggagaaatcggtgaagtaaccaaagtggaatgcgccaccgaccgtcctatctggccgcaaggactgaatgcccccgaaaaggcggaccgcatccccaacacattgaactgggatcttttcaccggacctgccaaactgaacccgtacaacaacgtttatcatccctggaactggcgcggatggtgggattacggtacaggtgcactgggtgatatggcctgccatattctgcatcagccgttcagagctctgaaactgggttatcctaccaaggtggaaggttcttctacattattactgagtgcctgcgctcctcaggcccagcacgtgaagatgattttccccgcccgcgacaatatgccgaaagttgccttgccggaagttgaggtacactggtatgatggtggtatgatgccggaacgtccgaaaggtttcccggaaggaaaacaactgatgggccccggtggtggtctgactattttccacggaacaaaagatacattgatttgcggctgctacggagaacaacctttcttgttgtcaggccgtgtgcccaatgcaccgaaagtatgccgccgtgtcaagtgttctcatgagatggactgggtacgcgcttgtaaggaagacaaatccaaccgcgtgatgccgaaagcggatttctccgaatcgggaccgatgaatgaaatggtggtaatgggtgtattggctatccgtctgcaaggattgaacaagacactggaatgggacggcgccaatatgtgcttcaccaatatcggtgataatgaaacactcagaacctgcattaaggacggatttacgattcatgatggtcacccgtcattcaacaagacctggacagatccgatcaacgcgaaacaattcgcagccgaactggtgaaacataactatcgcgaaggatggaagttgcctgatatgccacgataacacgataaaagtaagttaagaattaaagattaaagattaaaaattaaatagttattattatgaagaaagtattttatccattagcttgttgtcttgcagcgggagttttagtttcctgcagcggtcagaagaaatccgggagtgctcaggaagagcaatcggcaaacgaagtagcattatcatattcaaaatcattaaaagcagcagagatggatagcttgcaattaccggtagatgcggatggttacatcactatctttgacggcaaaacatttaatggatggcgtggttatggcaaggacagagttccttccaaatggactatcgaagacggttgcatcaaatttaacggttccggtggcggtgaagcgcaggatggtgatggcggagacctgatctttgcccacaaattcaaaaacttcgaactggaaatggaatggaaggtttccaaaggcggtaactccggtatcttctatctggctcaggaagtaacttctaaagataaggacggtaacgacgtgctcgaacctatttatatttccgcacctgaatatcaggtattggacaatgacaatcatccggatgcaaaattgggtaaagacaataaccgtcagtcggcttctttatatgacatgattccggcagttcctcagaatgcgaaacctttcggcgaatggaacaaggctaagatcatggtttataaaggtactgttgttcatggacagaatgacgagaatgtactcgaataccacttgtggaccaaacaatggactgaccttttgcaagccagcaaattcagccaggacaaatggccgttggctttcgaactgctgaataattgcggtggcgaaaaccacgaaggatttatcggaatgcaggatcacggtgatgacgtttggttccgcaatatccgcgtgaaggttcttgactaatgtaatatatcatgaaaacgaactatttattaatcttattcgcattgctgctggcaattccgcaggcagcagatgcaaaaaagaagaaagacattgccatacaactctattcggtcagagacatcataaataatggaaccgacctcaacgtagttttgaagaatctggcgcaaatgggatacaccagcatcgaagccgccaattatgataatggcaagttctatggcaaaactccggaagagtttaaaaatgctgtcgaaaaggccggtatgaaagtactgtcttcacattgttccagaggattgtcgaacaaggaagtggcttccggagatttctccgagtcactgaaatggtgggatcaaagcattgccgctcataaagcagcaggcatgaaatacatcgtaaatccgggaatcggtgttcctaaaacaatgaaagagatgaagatgtattgcgactatttcaatgaaataggcaaaagatgtcaacagaacggtatgaaatttggatatcataatcatgcgcatgaatttcagaaagtagaaaatcaagcggttatgttggactatatgattgagaataccaatcctgagtatgtcttttttcagatggatgtatattggatagtcagagggcagcacagtcctgtggactatttcaacaagtatccgggacgtttcaccatgcttcatatcaaagatgacaaagaaatcggagatagtggtatggtcggattcgatgctatcttcagaaatgcaaaggttgccggcgtaaagcatattgttgctgaaatagaagggtacagttgtcctgtagaggaaagtgtcaagaagagtttggattatttgctcgatgctccttttgtgaaggcgtcttatagtaaatagaagtaaatacagaaaaaggaaacagtaggttcacgctttattgcttgagtctactgttttttcttggtattgcccggctattattctgaaagatatgcgaagtatttatataccagatcatcgatggcactataaaagaaaactccttctaatcattaaaatacaaggcaactaactcacaacgaactagttgccccttttcgattcctaaaacagagttactacataaaattccctatacatctagttgggatagatcttgttaaacgttaggaaagcctatctttattctaccctcttgtaagttccatcttcagaaccgttctttatctttaatatatcttttgaaaataaacactcccatacttttttctgtcctttgagcttatttccatcatcagaataggtaatttcaatatttatattatcacctgagatttcatacgtaaataaatagttagttaaaaagctagctccgttaagaagcgcataatacccggttccatcattctcaaattttaagtatttgtgagttccttccgtacccgttgaccatgttcctaccaagtgtttcgaatctaagtccatccaatcatcatcatcagaagaacatccccccaatactattggacacaataaaatcataaaaaaaagaagctttttcattacgtatagatatttaatttgtttgtttggcaaaggtaggaataatattaatgtcataccaattatctttcaagcaataacatataacatatcaagcattaacatctcacttctcaagtattaactcttgatatatcaggtattaatactcgacaactcaagtattaatacctgatatatagtttcacatagaaaagagcacaagctataatatccatttaatacatgaaaattatcagagaatcttttggcattcaatatattctacctacctttgcagcattaattaacattaatgctttgcctgcaaagcggcaaaacaaacataaggaaatattaacgggaaatatacattgtgggacaaatagatagtgggaaatgctatttgcctatataaacttaatataaacatgactaaagtaaaaagaaattccgcttaatttctaagcaatgagattattatacacctacctcaatgatcgttatctccatacttattagatcaattaaacatattcaaaaaattcaatcaaagatttaaaaccaaatctttggtaataaacctgcaaaacaaacttttaataaaccctcaaatccgcaactaagcccttgaacgtccttattgcgtttacacgtcctctcattactgaatttgcagataatttgaacttgaagcacccacttctgcctacaatatccccttaccccacaatgtgacttgaggcaatacacaatatcattcccataagttgtaggcattatccaaaatcagtctggaaaacatctgcgtaagcattattacaggtatagatgttcagcacataccgccttgatgtcctgatccacttggctggtacagagataaacctgaagacaaacgcttttatgcgacttgttgcattgagcccgaacttctttacgtcaagtctttgaataatggccttgtaaaagttacggataagtgctgtaagaagaaggaacactgtgttctctgccatgaaggatttgggcaatctgtcccacccgaaaccattgttcatatcatcgaagatacgttcctttcctccacgaaggttatagaactcgacaatttctcttacggaagaatcatagtcgttagtcaggatacaacggtatgtgtattctccttcccaaaaatcctgcacaccatccatccgtttctgtctttgaatcacaagtcgatatgccttacctttccacttctcaacaaggatagagttcaattcaaactcaatgccattgatttcctcagttttccagcctttgagagcaaaggtgtcattgtagatcgaactgcagcggttagcacggatatagaaggacttgcagtgtttttctatttcctccacgatttcctcggaacatgatccacaatcagctctgaagcgattgatagtgagcccattctgttcaaatctcgcaaagaacctcttcagcgtgtccttctgatggaaacgaacatttgtgttaccatcgctattctctataccgactatcaaatcgccaataaccgccacgccagggcgataaccaaggaacttcttgtatgtaggctttgcatcatacttctctgtctctatgaactgatggtcgaaatcaacatcatacatctcaccctctttcagttggccagatgcaaatatacaattgagcaataaagtattgagagtgtcagccgtattgaaatcgtaggtcttgcccatatctgatgtgtatgaaatgttttcttgcgtcaactcctttatcgccctgaggatagtatcagagctacaagtgcgaagtgtcggatgaagcgagaggtggttcatcaaatgagtagtgacatcctcaatacatgaaccgctacagaagtagatactcatgagagaacggatgatttcgctgtactgataaccgaacgatctacaccttagaccgagggttgagtcgattacagatgataatgtggagtcaaattgctccatgattgaaaataatcccccaaaaggagtgagtctctcagatttaatttgtatcttcgccatgtctatcgtcggattctcttgttttttttgcaacactaagataagtgaaaattctgacatggcaaaatcctgagcaactttttgttgctcaggtacttaaaaagtttaatttataatagtgttgcggaattaaggttgatttaatgccaaattcttctacaagcatttttctaaatacctgtatggcttcttccgttcgcttttctttttccatatctattttctttgtttattgcggataatgtttggtggctaactaacctttataggaatgttcagccgcttgttataataagtttccaatatcaaagcctaattcttttaatacatttgtttgttctttttggtattccaaagttccactatggataaaatctttatttacaatatagctattggggaaatccttgtaatacctcattagaaagtctggtataatttcataagtattaaaacaaaataaaatcttaccggattttactaatctaataaactcctctttactttcacattgataaaggttcccatcttcatgaaaaactctacattgatcaagaaataatttcatgttgaaattagcaaaattagctaaatattgagggcgttgccaccgtgcaatatctgtacagtttggagatgatacgactttttcccatatacctcgttttataggaaaagagttacagctaaaatagagacgataatgggtttgagcaaatgtctcttcattcagttcgccttctaatgatgaaaaaacgccataacagtcgtttgtcaaaagtcttacataatacaattcaccacttcgaccattaattttataaattgcccccaactcatattttgccataatgctttgatttttatttattataatgtttagtggctaaccaacctttcgggaggttaagccgtttgttatcgtcggtttgtagtattctattcaggaatcatttccggaattttcattctttcatactgctctattttaggttcatttccttcaaatttaattcctcgcaaatcacaactgataaatcttgttcttgtaaaattgcaattatagaactttgaggccctaaactctacatttttgaattctgcaccagtgaaatcacaattataaaattttgttcgcctgccaccatattcatatccatatgttataataccaaatttagcatcaataaagcaacaattctcaaaaatggcatcatcagcattaattaccaacttagattttcggaaattacattctttgaaaattgatttatccattaaacaactgtcaaatttcgctctgaaaaaatcaacattgtacaaagaactttcaacaactgaacaatcaagaaatgaataagacatgttgattgtttcaaattttgattgtttcaagtatgctttacgcaactgaataactgatgatttgcaactaagttctatgcccgatagatctaagtttgacatttcgatgttgctttgggtaaactgctctaaaatagggctaatttgctccaaaaatattggattgaaccatttttctttaatcttcttcatttctctcagttttctcgacgataatgttcggcagcgttccgcttattcagtcggtctgctgtttgttttcaacttatattttgtctgacaacaccatgttcataagccaaactatcacattctttttgcatattggtcagaacatcttcgaccacttttaaggaaacttcttgtggtacatttatggatacgaatgaagggagattagaaatctctaccttgcatcccatatcaagtagtttgtctctgaccatctgcatacgtttatcgttaaaatgtaccctcaatgtgctatttccagagggattcactatggattgaaaatgatattcgccatcttcttctgtaacacatatctcatcccccaaactgattccataggtatagaatggcacattatcgacaatataggtatcattacttgcctttttgcaccacaaaccttcaatagaaaatggtggatagccatcttcatcttgttccaagtggaatagcacttttatatgtttgtcttttttcattttattcattaataagttgataatgttcggcggataatcgactgttagggagattaatccgcttgttatgcgctttatttaataatacaattatttacttttataaaatgacttccttcaatatcttttagtgcggtaggacttattttcaccttagttctatacacattttcacctattgtaatcgtcagatttctacataattgctttatcctttctactaccacttggtacacgtcattataattttccaattcgttacatagaatttctctattttcctctattgaatatattttcttagggtactctaattgaacccccattatattctctggaaaatttatgtaactgaatttggtttgtaacttatgttcttcatcaagatagaaggcaaatagattgaacccgacgcaaggctctatgaaatcctctgttttataccataatccatcatttgaatcttgaaagggggctttatacgcacacttacttagattgtttgaaaagcccgtgagcaaattgtcgattacaatatgctcgattttttcaccggacgttagtaaacggtaaaaagattcgtaatcccttacaaaatttgcaaagttactttctatataatccgcaggtactctacggttgtatatcacaatgtgaaatcctcgcaaaatgtctttcaattcttgcggtgtaaccaagaacttgtaagtatgccatccttttggataatatttcatgctcatattgtattagtttctaagcggataatgttcggcggataatctctcttacggagatttatccatttgttaccgatgtgccatttatttctatttctttaaattttaaaaactcatttgccttatacaaatgaagtaattgcattttcatattttcattgacaatgtttttataaaaaccgtatttattccacccttttaaaaagaacccatctacagatgaaggtattttagacatatctaacacaagtgtactcatgcattcaaattcttctcgtttggaatgaatattgtcaacacaatcaattacttcattaaaaataattgccatataatcaagtgggaaatctccatgtactgaaaccctttttaaagaaattccttttatggaggacaattcgtttatattcaatatatcttctctgacaagaaacaaatggctgacttcagcaaattctggcattcttatttgcccaaatccagatatacttttagcgattagccccttacctttgataagagcttttatttgatacctttccgatgaagatgaatctataattctttgaaaattaatttctttatcttcatatataaactcccacgaatatgtaatacatttcttccatattcgattttctccattcaagtatattttataccatttcatattgtcattgttaatcggtaatgttcggcagcgttccgctttaagcagtagtgctgtttgttactaacgtttacacatcgaatagagattcattttatctttgaacatctgttccggttcttcatatccttgcaatttataatattcaagtaaaatatccggatgtttagtcaataaataataatctattgaacgattcgcaacttcaagaatgtcatacgttttacagcgttgcttatattcatcctctgacatttcaagttcttttactatatactctcgctctgattcatctataacaatttcagtattttcagtttccaataaatcctgtttacaaaaaacttcaaaactatacgatgaaagataagtatataaatcttttattgatatttcttgaaagttgcaattacagagcaaagtattacattcggagatataattttcaaggtaatcaattcgtgcttcctcccaaaagtcattttcttcacaaaaatgaagttgtggcaactcttgttgaattgtttgccatagttccttcaattctttactttgaagtagtctttcaatttctattcgatttaccatatttcttgcaagttagtaatgttgggtggctaaccgacctttcaggggaggttgagccgcttgttagtgtcattttttatcttattctcaaccaattaatgaacatatctgtaaatgattgggataaaaatctattctcagataagtctaaatctcctaatggttgtaaaaaaataaaagtaggttctccaaaataaaaaccgatacaattatcgcctccatcagtgccaataaccaaagattttttcgacaaatacttttgtatttggtattctttgttcagttgcatcaaatcttcaatcttccataatgataaatattgactaccaatattaccttctccaccattactccataacataaattccttataatcatcgggtaatggaaacaactttcccacactcaacattatttgttgatcacatggaggattggagtgccaacttttattgattttttctattatctgtttcattataattttatatgacactaatgttcggcagcttgccgccgttaggcggaacaggtgcgtgttagctacgttctttattgttccatctttcgttttacgatatctataaactcctcttttgtcatgaacttatttagaaaatcttccaatgttccttcattagtaacctctgtaaaaaactcctcatggtctgtactccatacaatcggattatcaacattgaggtctgatacacagatatagtagttattgggataagcatctgtgtaaagcaattccacaaaggcaggagtgtcgcaatttgaatgttgaatgatttcgtccaactctgcatcatctgaaaaccaatcattccattcttcaaaatcttgtgtgcccttttgaaacggagtgaaaggctttgctacccaaaataattgcccacgaggttcttcgtccaatgtatagtaggtatcaaccattttcttataaaatgtttctctgtcagaattgaataattccatgttctcatccacccaatcgcccaaaccttcaatcggttctgtatcttcggcagacagccaaggtgtatcttccggcttttgatataaagcagtgttgaaagttatggcacacaaatcttcttgtaaagacactccttttacattggcgacattaccgcctaattgtttaattcgatttacaatttcctttttcatgactttaatgtttttttgttcgtagctaacatgtaattatcagcggttttcgctgttattttcttatttaactatctcattatcaccttcaagaatatcatccaatggagtgcggatgctgctcttgaaagtgtcggctatatgcacgtacatttccgtcgttttcagttggttgtgccccaacagctcttttacgattttcaagtccgtgccttgctcgatcagatgcgtggcgaacgagtgtcgcaacaggtgggggtacacccgcttggtgattccggcttccttcgccgcctctttcagcttcttcgacacgatgctctccgtgaacggctcgcccttgtaccgctcgaacagccattcctgcggcttgtacagcttggcgtactcggtcagcttcctgacaaggggcttcgacagcagcgtgtagcggtctttcctccctttgccctgccgtacccgtatcagcgaacggctcacgttgatgtcgtggggcttcaagtccagcagctcgctgattctcaacccggcggagtagagcaacgagaacatgcagaacagccggatgtccggaccggttgcgtcaaggatggattttatctcctccttgctcagcacgtcgggcagcgtccgttcccgtttggctcgctttacctcgtaacatttccgttcctgtcccagcaccttctcgaaataaaacttgatcgagttgatgcgcaagttctgttggcacgacgagatcctccgtgtgtcaatcaggtgtacgatgtaggcgttgatttcttccggtcggatgtagcgaaggtttcttcccgcaaagtattgctggaactccctgaaatagacagtgtacgcacggacggtatgctcgctgtaccgcagttgccgcagcgtctcggcatagccgggcgggatggcggggctggttttcccgctcttcttgggcaaggtgtttttcagggcggagtaattgatatacgccgtttccacatggcggtcgaaaaagccggacaggtcgaagccttcttccggcaggtaggctctgtccccctcgaaccgcacgcccttctctttcgacagcgacagccggatggcatcgtcctcgtcgaactccacttccacgtatttctgcccgtcacggatggcaggtgaaagcgttattctcggtttgctctgataaactttcatacgcatcgcatgggtggcaatgacagaccgtgtccctcattacccatattttacaaatatagagaaaacaacgaattatcgccgttttccggaggagaaaaatgcgtgtggggcatgatttttttgtatttttcacaggaaagggctgcgacaaacctgcgaaccggacgacaagtgcggacagcccgccccggacttgcacgttccccgtgtttctccctctatatttacgcccggtttcacttgagaaccaatagtattcaccatttaaaaacattagattatggacgaacgaccggacagcagccagcagttgatggacatcctgctcgtcatggacgagaaaggcacgctccaagccgtcagcggagtaaaggacggcgagttacagaccaagaacccgctggaggacaacaacgacctcctgcgggtggatcgccacggcgatatgttttcgaatttcttttccaacctctggaaccagttgaaagacccgacccgcttccacttcttccgtgtgccggaagaggaggtgcagcgggtagccgccgatttccggcaacgggagagccagtccgtcaagacgggcgagccgctcgttgcgcagtacgaggtgcagccgcccgtgcaggcgcagcagcagacccaagccgggcagcagcaacagccggagggtgcgccgcagcagtccgccgggcagaccgaacagaacccgcagtacaagtaccgcccggaggacatcgactggaacagcctcgccgccctcggcgtgcagcgggagcagatcgagggcaacgggatgctcgaccagatgctccggggcttccagaccgacaagaccgtccgggtgcatttccacttcgacggcatctcgcacagcaacgacagccagctctcgctcaagcccggcacggacggcaggctgaccgtgtgcagccacggcatcctcgacccggagaagatgcagaagcagttcttcggctacgacatcaccgactccgacaagcaggtgctccggcagacgggcaacatggggcatccggcgactgtcaccaaccgggcgggcgagcaggtcgaagcccttgtcagccgcaacctcaagaccaacgagctggtcgccttcccgctctccaaggtcaatatcccggcggagaagaacgggcataccttcaccccggacgagatagcccggctcaaacagggcgaggcggtggtctgccagttcctttccagagccaaggagggggagcagcccaagctctacccggcacccgtgcagttcagcgcagccaagatgcagctcgaatttctcttcggcgaccggggcaggctggcgatggatgcgtacaaggcgaacctgaaacagaccgccaatcaggaggtaccgaagaccttccgcaagcaggagcttaccgagaagtcccgcctcgaactcgaagccgggggaacggtcaaggtctccggcttggtggacaagaaaggaaaagcctaccaaggctacatcacatggaagcccggcgagaagcccgccttcatgttccccaaggactacaaggcggcgctcgaagaggggcgtgtcaagcccgccgtggagaacgaggtgcaggtggcggtcaattccgagggcaagaccgtcgaggcgacccgcaacctgaaagaagccctgcaatccgcacagcagcgacccaccggggagcagaaacagcagcaggagcgcaggcaggagcagaaagaggaccggaaacaggcacagaagcaggaacagcccgacaagcccaagcgcagccggggtgtccgtcgatgatttcccccgccattctgtaaatgaattacccggttatcccgtccgagcggcgggataacttttgtcaaaccgttaaattttaaagaaatatgattacagcagtcatcgctgaaaagccttccgtagcgaaggatatagcaaacgtgttgaatgtccgggagcggcacgatggctacctctcaggtaacggctacctcgttacctgggcgttcggccatctcgtccagctcgccatgcccgaagcatacggctacacgggcttccggcgtgagaacctgcccattctgccgcaggagttcaagtacatcccccgccagatacgggagggcaaggagtacaagcccgaccccggcgtgctcaaacagttgaaggtcatcagggaggttttcgaccgttccgaccgtatcgtcgtggcgaccgacgccgggcgtgagggcgaagccattcatcggtacatctacaattaccttggctgccgcaaaccctgcctgcgcctctggatctcctcgctgaccgaccgtgccatccgggaagggctggacaacctcagacccggcagcgactacgacaacctctaccgtgccgccgaagcccgtgccatcgccgactgggagattggattgaatgcgactcaagcgctttccatcgccgccgggcagggcatctactccctcggacgggtgcagacgcccaccttgatgatgatttgctcccgttatctggagaacagggatttcaccccgcagacctatttccggctgaaggttacggcggaaaaggacggcacgcccttcgccgccatctctgaattgcgttacgaaacccttccggcggcaaacgccgccctcgccgctgttaccgcaacggggacggtgcaggttgccgacgtgcagcgcagggaagtgagccaagagcctcccttgctctacgatctgaccgccttgcagaaagaggcgaacggcaggtacggcttctcggcggacaagaccctctccgtcgcccagtcgctttacgagaagaaggtgttgagctatccccgtaccggctcccgctacctctcggacgatgtgttcgacgagatacccgaccgcatcgcactgctgaagcggtacccggctttcgccgcccatgccgccgccctgaaaggagcttcgctcaaccgccgcagcgtggatgcggggaaagttaccgaccaccatgcgctcatcatcaccgagtgtctgcccggcgagctgtccgccgacgagcgcacggtgtacgacatggtagccgcccgcctgctcgaagccttctccgcccgttgcctcaaggatgttaccaccgtctccttcacggcgggaaacagcgtgttcaccgccaagggaacggtcgtcaggtctgccggatggcgtgccgtgcgtggcgagcgggacgaggacgacgagggtacagccgctttgccgcccttgcagcccggcgaggctttccccctgcaatcggcggagtgcgtggagaaacagaccaagccccgtcccctgcacaccgagagcagcctcctttcggcgatggagcattgcggcagggagttgcgagacgacgagctgcgggacagcctgaaagggaacggcatcggcacgcccgccacccgtgcctccatcatcgagaccctctttgcccgggactacgtgcgccgggagaagaagagcctcgtaccgaccggcaaggggcttgccgtgtaccagatagtgaaggacaagcgcatcgccgatgtcgagatgaccgggcagtgggagaccgccctcgccaagatcgagagcggggagatgaatcccgacaccttccgcaagggcatcgaggtctatgccgcccagattaccgaagaactcctgcaagtgcaggtatcggtggcggacggcggacatatcccgtgtcccaagtgccgttccggtcgcatcctcctttacccgaaggtcgccaagtgcagcaacgtcgattgtgggcttaccgtcttccgcaacaagggggagaagcagctcaccgacagccagattgccgacctcgtgaccaaaggcaaaacatcccttatcaaaggcttcaggagcagggacggcaagcccttcgatgcgtacctcaccttcgacaaggacttccgcaccgtgtacgggttcccgccccgcacggacaagcccaaaggaaaggagcgcaggcgatgaacggcatcggttggatcaccgtggcggaagccgcccggctctgcggcacggacgagctgcgcatcaccctctggatgaacggcaaccacatcgcctacgcccgtttcgacggcatcctgatgatcgacggcgcatcccttgccgccctgttcagccgcaaccgggtcgccaccatctacgaagacgtggcgcaacagcggggcaagcccggcagaccgggcaggctccgccgcctgctcgataccccgctcgacaccttcggcttgtcgcagcgcatcgtccgggcgtgccgggagttgggcgtcttcaccgtggagcacctgctcgtccacctccaccgcttccgcttctcccgcctgtactgtgtccgcaacttcggcagcggatcggcagccgagaccctccggcggctccggcaggacggcttgacagacggcggcagcccacgggatttcaaggtcttgtacccgtaaaggcttttaagcacaattgttaaaaaacaaccatgtagttctcttgtaaattaataatatagttaataatatactgatctacattgtaatataaataaaatgtataactttgcagaccaatttgaatgtaatggcgactaaaaaatactctctggctattgagaaaatagatgaagtagcaaaagaatttattgctgcccgccctgcttatacgcttcacataaaggaatgtaaccaaggaaagcaaaagcagatagagattatcaatataaaaaatcaggaaaaaagcacattaaattgttttattactggtggacaagtttctcataatatacaaggcaaaaatggaactttgaatggaatttgcaaggattgttgggagtatattgtggaacagactgcgataccggatatggatcaaaaatgcttcaaattgaaaggtgtaaggagcgatgattttgatacattgatttcagcggtaaaagaatataataatgttgttgtttccgaagtaaacacggataagagtccgaacatccggaaccaatatcatctgaaagggaaatacgatgctaaggtttctgttatcttttataataacggaacattaatggtacaaggatgtatcacatcattttatgtggaatttataaccgaagtgttgcaagctatatcttccattccttccgaagctatagaagaagtgtttgctatccaagcacgtgctggctatgcattagacaacgatcttagcaagtatattggaaacagagagcatattgatggaagtgtgatagaaaactttatcaatacttcaatcaatttggctaactctgcggttaaggtggatgattatggatgttatacttttggcattttgaaagcgttagatgcggtattgcgcactcgtcttttggaagatgcgcctgattttgacgaatacgggacatattttcagaaaaataatagtggggcgtattgctttaaaagtggtatcggaacgtatgacaacaatctacatttgaagcaggctttggaacaaggatattcattcttcaatcaacataggcactcgacattccatgtggacagttttaatgtggaaacaagtagaacccttgaatacgatgaagccgtaaacattattaaggactgccttgttattattaataatatatgtaataattggtaaaatggaaaataaagaatttcaaataatccccttgcaaggacggagcttgttagtggttattttatcgtcagaaatgacgaactactactggaaagagcttcagactgaattggcaaatctcaacattgccgatgcagaggtctattttgattttctgtaccgcaatggattaaaaaatagattctttaagtctaaacttaaagggatgatgttaatttccaattcattaagaaaatgtgaggcacccaaagaatatatcaaggttgccgatactttttttgcttcacattctaaatggattgacagtagtgtattgtcttctttccaaaaaatcttttataaaaagagaattattgacactcagtcattgccaacggcattgtaatgtttgtcagttacatattatacaacaaaggtgcatcattgatgcacctttgttattttgtacctcaaatttaggcaacggtattacctaaatttaatattcttttgtctttcaaagaatttaccttatctttgcaccaatagaacccgccaagcctcttgataatgctcaaatcggcgggtcgtttttttataacccgtcatcctttcctgaatgacccaagccacttttcagtggctttttgcatttcatgggcatacccttccgtacaccgtccggattttcccgtcctccaataccttgctcgaccgcacgacccacgtcctgtcgtcattcagcccgcactccagtgccttctcaccgccgccgaccagtaccggcacggttatcaccacgatttcgtccgccagcccgttatccaagagcaaagccccggtttccgctccgtaagccgttaccgtaccttcgccgtccgcttttattccccgcagttccgctgccgcatcccctgtaacaaaccgcacccgttccttctccgtcaaatcaatacagccgtccgtcacgaccaaagtttcttttgccgtgagcggccagcccagatggttcaggtaaatgcgcaggtaggtttcctcgtcgatcagcacgcagccggaggcgtccaccgccgcatcgaaatacttgtccgatctgaccggacaaccgtcaatggattggtacacgtgcaaggtaatctgtttcatatcaatgtgtttttaaggattatgtccgcctcgcacccaaaagaacggcgtgaactcacgctattccggaatagaggcactggtatacccgacaaacagaataggtaagcgcacgccgtataagcatacagcatgtgcattacaccatccgtcctgtttgtcaaaaattaccagttttctattccaagacgttcagcgaacgtacaatatgtatatcaatccctgcctgtttccaagccgggcatgaatcttctatgtcacgacagcgggcgtgcccgaaagcaccgccttctgtcttcgtggagcaaagatagcgaaacttcccgaataacaaaacaatagccccgcctaatctcacgatccggcagggcttcatccaccaaaagcaccgtcagaaaaatgtcattttcacgggaacaacccccttttcctgcgcctttcctctttccgggcttccttctccttgcgtttcgcagcccgttcctccacgtcggcgaaacgggtgcggatgaactcgtgcacgtccttcgtgcggtagaacaccttgccgctgatggtgaagtacggcaacaccccgatggcacggtagcgttgcagcgtgcggatgcccaccttcagcagcaggcacaggtcttggttgtccagcacctcctcgccgtcgagcgtgttgttcttcttcagcaccctttccagcaatttctccgtccggtcgaagcgttccatgatgcgctccatccagccctcaaactcttccctgtccgtgtacatagcagtcgccctccttttcgatgatttccttttcccgcatatagcggatgtagcctttcgccgtccgttccttcacttccagcatctcctgtatcagctcgcacagttcgatgtagccgtacttctcctgccgggcgaacgcctcccgtgccatctccgccagctccttctccttgcgcttctctttctccgccctcggcttctcgcccacatagacgggcatcccggcttgcttgtcccatctgaactgcatcagcggaatgtccagcgggctgccgtccctgaccttcaacgccttcaccaccgacacctccgggttctcgtccttctcgatggagaggatggcggcggacttgcgttgcagctcgctgccgaggtgtccccgcagcttcagtccgttcggcacgaaatgcaccacggcggcgatacacgtgcggtagattcccgccagccggtagatctcgtcaatcagcgccacgctctccgcctcgtcgttggcgcagcggatcaggtccgccaccccgtcgatgacgaccagatggatgcccccgtgcaggtagtggtaccggtccatgctctgcacgatggcggtcaaccgctcgcttctcgacatccccgtcaggcagtacacgtgcagatactccggcatccgctcacgcccggcacggcgcagcagccgccccgtgttcttgtggagctgttgctcgctctgttccgtgtcgtagagcagcaccgcacgccccttgcggttcggttccacccgcacccccaagagatcggcgtccgtctcccgttccatgatcgccccggcgaccagtgcggcggtgtagttgctcttgcccgtcccttcaccgcccgtgatgcagaggatgttctcttccgagcctaacggcacgtccccggcggtaacgatggcgaccgcctgttcgggcgggtggtcatagtcgatctcgcacgatttcagcatcgccagcgtgtccccgtacagcgtgtcgagcagtttcaggaacagccccatcagctcctccctcgtgtgcccggctttgaagtagtccgtcacgtccttctccgccttcgtccccgacaatggcagcaccagccgtttcaccccgtactccgccagttgcgcacggtgcttctccgagcattccagccccgtcttgtccgtgtcgtacagcagcacgatgtgcttgaagcgatagaccagcttgcgcacggtcttcgccgggatgaccgaggtctccgagttgaagcagatggcgtggaagccgtgcgccgccagcgtcagcacgtccttctcgccgcccgtgaggaagagcaggtcgcccttcgagggcagttgctccagcccgaagcagtagttgtcgcccgtgtgcccgccatagacgaagcgcacctccgacatcgggcgatagaccttcacgccccatttccccctgtacccgaacatcggttccgccggggtggaactgaagccgaacgccttgccctccctcgtctcgccccggtactcggcgagcgataccgtcccgtagcggcgcagcacctccacggtgatgcccgatgcgccccagtagacaagctccccctcggtgaagggcttctccgccgcccggtagggcttcggttcgggacggtcggcggacacagccgcctcttccgtgtccgttccggcttccccggcaccgccgccccttgcgcccggcacgagccgcaatctccgacagcccccggttcccaccgtcccgtcggtcgggctgtccccgtccagtccgaggcacagctcccggtcgatggtgtgcagcacctccacgaagtcggcggcgttccggcagtccagccctttcagcttcgccacgaggaagaagcagtctcccgaatagtccccgttgccgaagtccttcatccggtacgtaccgctccggcggtcgtaatacacgttgcacgaagccttgctgtcggcgtacagcgggttcaggaagttcctgcccacccgccacttcacgggcaggtagtggcggaacacgtccagcccgttactggttcttgccagcacttcttcctttcttaccatagcttccgttttttcggttatgcaggggatgttccgctatcatccggtcgatcttggcggcgggcgtctccaccatccaccgctcacgcaggctctcgacagcctgccggggatagcgtatctgccgcccgatcatcgaataggggacgatgttcttctggcggtagcgttgcagggtgcggtggctgatgtccagcgcctcgcacacctccttgtgcgtcatccacttcgggtcggctttccgtcccttggtcacagggctttccgcttcctctttccgtttgcgctccgtttcctcccggttccgggattcctccacgtaggcggttatcttctcgatcttctccacgagcaggcggtaggcgttgctctcgatggtcattatttccattgtcgtactcatttttaggtttctgccgcaaatgtcgcccgattcgccggtttttcctgccactataccagcaccttggcaaagattttttttcggggcgcattttcgcccttgccgccgttccgggcggtaaaaaggaccgagacggggtaaaaaagagcgtccggaaggctctttccagcccttcggacgctcccttcccgtgtcctgccgtctctgccgccccgttgccaacttgctaccggctatccatgtcccgcatctttttcagcagcctctccttcatctcgtccaagaacgccgtcgggttctgttgcccccgcagcctgccgaaagcgtggtacacgttgcccagatccacgtggaaatgcttctcgaacagcgcagccagctcgccgatctcggcgttgccctcgtccacgcttcccgtcacgtgtatgccatagacgagcagtatggcggcaaccttcgtgttcgtccagcggtgttccttctccggcacggcttccgtctccgtcccctgcgccgcacgctccatccggcggctcaagtgtaccagcagcatctccaccgagatcagccgtgccgccagtatgtcgtagcccgtggagaactccgcctcctcgtccagcacgaagctgccgctctcggggcttagctcgcccttcgcccgcaggaaatagtagctgtcccggtacgtcgccccgctgtgataatactggtaaaagggcaggtagcgttccatcatccgctcggcacgctccatcgccttgcggtagtacggttcggcgacacgcaggcaggcggggcagccgctctctatctggtacacccggtaatagtacagcagcctgcccgtcagggcgggtttgtaatacttgaagtagaggatctccttcgcgtccccggcgaacggatgggcgagggcgtactccttcagttcccggttcttgcctttcaggtacgagaccatctcacggcagacgcctatcacctccttgccgtccatgccgggggctgtggtcgccatgcgctgatccacctccttcagcagcccgttaaaatattcttccatataaatcttgtttcatgttgtttataagggcgcaaagttagcggacggcagggaaacggacgttctgaatcctcaccgccggattcggattgtccgccaatcgaccccggacggtcggtttttcacggcagggctggaaaagggaggctaaactgtacgggcgcaccgggcgatttcacggatttcggcaggagtagccttcaggtgcttcttgcagaagtcccacaggtagctcggagtggcgaagccgcacacgtcggcaatctcttgaaggggcatgtccgtgtccgccagcagggaggttacgtgcgctttccgctgttccgtcagccagcggtgcggagtggtgttcagctcctccttgaaacgccgtcccagcgtattgaccgacatggcgcattcccgtgccagttcctccacgttcttcaccttgggcagagccagtgcgatttcttcccggaacgagcagccccgcaggtgcggcaggtacttttccacctcctgcaagtccgccttgccgaacatcggcggtatgcccttgcggtactcggacgcccgttcacggcggaagcggaacagcagtcccgccagacggttgcagagcacgttcaggtgcgggtattcgtcgtaggcgttgatgcttgcctgcatccggcagaggaacaggaatcctctgcagtccttctcccggaaatacgcctccgccgtttccagcaggaagtctgacgagcttccgtggcggtgataggcgaccagtatcagcagcccggcttcctcctttacccggcacgaaagtacggggcagtgttcccgcagcagctccaccagccgcaccatccgtccgttctcccgtgcgagccgttccgccgcaatccatgtcaccggacgctccgcatccgtttgcggcaataccctgcgtaccttttccatccattcccgccatccctcccggacggcttcattcattagaattagtgtaagattctgtttcattttgtttcaacacgatattaaataatacaaatcttacacgaaattacaaattgtttgcaatagatgtcctgccgacaccccgtatcggtcacgatatttccttgaattacagattcggattttgctccataggttcggatattcagtcgtgaaaaaacagaaaggctgtaccggttccacccgcagaacggcatgacagtaagcagggggagccggaagaaagtcattcgccggttggtgagtgcgtcttttcaacgggatatttgccgtcccgtatctcctgcaacctttcgatcagtggttgctccttggaatggttcttttgttcggctataatgaagaacgatgcaaaactgccgataacatacagccagaacaggcattgaccgagcaatttccggtattcgcccactgtctcgtacttcgcctgcatcgctttcagcttcgcaggacggtaatacagctttctggcaatccagataaaaggagcgagcgtcgctgcggcgaacagataggcaaccgggttgaacctgctccattccaccttgtccgtcagggaagagaaccagcccgtcagcatatcccatccccatgcctcgaacaaaagatggagagccatcaggttaagaagccacaggattgccatcgtccacgtggcattggagataaccgccttgtctttccttgcacgtttgttcttgctccagaagtaatacatccagtatgccggttccttgaacatagcttcctcctttccttgttttccgcttgcttatcccgttacgaagaacagcaacagggcgcatcccgttgcggcggcaacgatcagccccagccagaaacggtaactcctttcacccagcgtacccagccagaaattcccttcccaacttcccggacgggagtacgtccaccgccatccgcagacaatccccacaagccacagcagcaggattcccgccacgatcaggtagccgtacctcggatgcgcctgcaaccactccggcagaccctccataaactcgcttatcttatcgaaccattccatagcaataacagaaaaagccaaattcataccttacggacgaaccgttatacctcaaagcaaaaatagtgaaaagtccaatcactcaaaaagtttcaccgcaaaaatcttttccgtttggaagaaatacgttttatttgcacctatatagccgcaacgtatgaagaaagcctccccacataaaagaaccagtcggccgaagctccccggattcttcgaccacctcttttattgggcgtggcgcagttgtcggcacggcttcccggatcgtagttttgcggtcatcagtgtggtccagttcgcctgcctcctgtttcctgtcgccatcgctttacagttcttgggcactccggctgtccgcttcctttacgaaacagacgaccgccttacgcttttcccgctgatactgccgttccccgtattgctctggaggaatatgcgcatctataccgaggagcgttaccgcatgatgcacgactattacggggcgttccatgtatcggtacggcaacgctatcgcctccgtttccttgtctgcacggtgcttgcagtccttgccatcctgcttgaaatacggctgttcaccctttatcatgaccgctgcacggccatatcctccggcaacagccatcccgcaagcctctatgtcccgtaccggtatgacaacggcaacgaccccgtgcaggaaggcgtttaccgcatcgtcgatgaaaaagggcgtatcggatatgcagacgagcatggcaataccctcgtagaaccacgcttcgcttttggctttcctttcgagaacgggaaggcgaaagtaaccgacacgggagaactggaagaagctcccggttcggatggggaataccactattgggaaagcgatgattggtattacatcgaccgcaaagggcaaaggattgaataaaagccccaagactgccctaagcccgacattccagccaccccacctgccaagcccttgcagggcaaacacgaagccgccaagccctatcggaacatcccgttcatcccacctttcccccgaaacaaacaccaaaactcaaaaccaactcatttacagaaacttaaaagaatatcggtgcaagccgcaaaacagccctgtgtggctggtgcaaggtgcagctatatatataaatatagctgcaccttgcaccacagaaatacacactgaaaatcaacattttacacttcgagtaaaaccacgggtgcaacctcgttttttgcaccgcctcctgattttatgcttttcctgtaatccggtaatcccgaaaaataaaaaatccccgaaacatttccctttttcggtcaaaattcctatatttgcatcagttccaagagcagagcgaagcaatgcagcgaaacccgcacagctaccaaatcgctaccggctaccgaactttctactctttaagtcttatctaccaaccgattacaaaaaaacgattgtttttcaccaaaaaaggatataatccttcaacagaatgattcatttcatttctcgattatccatcgacagggaactcaacaataatagaaatcacattattttatgaacgaatcaaatgatcaaaaccactaaaaagaagagtttatttagaaagcgcctccggtctgaatggagagatttaccggctagtatctgccgaaaaaagagaatatgaagtcatgggattgatgaaacagtccggctgaaaacacaaagcggcgctttgtgtgagctaaagcttagctttaggagtcgtaaagctaagctttagcctccccaaagcgctatgttattaaccgatgcaaaaatgcactttttcgggggcctccctaacacacgcacacacgtaagcgcacgcgtatacacatacacacacgaacataactaaatacgcgcaaactatattatatacgcgcgcctgtgtgtggaaaaattgtggagtgcattttctgcatttttgcatttttcacctccgccaagctgttcataaagaaaagatttatacgcatactcttccataattcatcccctttgcccacgtattccgctattttaaggctaaaaagcacattttctcccgaaaagtttttgtaatatcagagttaatcgtatttttgtgtacaattttggtgtagtgatgacagaagaagaaaaaaagttattgagtacctttgaaacgcagctacggcatttaatgtatttgcacgatgaattaaagcgtgaaaatgccgggttgagaaaacttcttgaaaacgaaaagttgaagaacgagaaggtgcaagctcagtatgatgaattggaagtcaactatacaaacctaaaaacagctacggcaatcagccttaacggcagcgacgtaaaagagacgaagctgcgattgtcaaaattagtgcgtgaagtcgataaatgcatcgctttattgaacgagtaaagaagaaagatgtatgaacgataagataaagataaacctgcaaatagcagactcaaactacccgttaaccattaaccgagaggaagaagaaatggtacgggaagcagccaagcaggtaaacatcaggcttaatgcgtaccgggaatactataaaaaccttgaaccggaaaagattattgccatggtagcctatcagttctcgttggagaaactgcaattaatgcaacgtaacgataccactccgtatacggaaaaggtaaaagaactaacggaattgctggaggattattttaagaaagaataatgccaccgagccattcactgataaagaaaacaccacgcactgcacaatatccgagcaaatgtatgctctgatatttggcggtgcgtttttatttatataactaaattaatgtaagaatgatagcaataatagcaacagcaattgcttgcttcgtcgtaggaggaatcctttcatacgtactgttccggtacgtattgaagtccaagtacgacagtgtcctgaaagatgcggagacagaagctgaagtaattaagaaaaacaaattgctggaagtaaaggaaaaattcctgaacaagaaagctgatttggagaaggaagtggcactgcgtaatcaaaagattcagcaggcggaaaataaactgaaacaacgcgaaatggtgctcagccagcgtcaggaagaaatccaacgcaaaaagctggaagccgaagccgtaaaggaaaacctggaggcacaacttgttatcgttgacaaaaagaaggaagaactggacaaactgcaacatcaggaaatagaaaaactggaagcaatctccggtctgtctgccgacgaagcaaaagaacgtctggtcgaatcactgaaggaagaagctaaaacgcaggcacagtcattcatcaatgacatcatggatgatgcgaaactgactgccagcaaggaagccaaacgaatcgttatccagtctatccaacgggtagctaccgaaactgccatcgaaaactccgtaacggtattccatatcgaatcggacgaaatcaaaggacgtatcatcggacgtgaaggacgcaatatccgtgcactggaagccgctaccggcgttgaaatcgttgtagacgacactccggaagcaatcgttctttccgcttttgacccggttcgccgtgaaattgcccgtctggctcttcaccaactggtaacagacggacgtatccatccggcacgtattgaggaagtggtgtccaaagtacgcaaacaggtagaggaagaaattatcgaaaccggtaaacggacaacaatcgaccttggtatccacggtctgcatccggaactgatccgtatcatcggtaagatgaaatatcgctcttcttatggtcagaacttgttgcagcacgcccgtgaaacagccaatctctgtgctgtgatggcatcggaactgggcctgaacccgaagaaggcaaaacgtgcaggtttgctgcatgatatcggtaaagtgcccgatgaagaaccggaattgccgcacgcattgctgggtatgaaacttgccgagaaatacaaagaaaaaccggatatctgcaatgctatcggtgctcaccacgacgaaacggaaatgaccagtctgctggctcctatcgtacaggtttgtgatgctatctccggtgcacgtccgggcgcacgccgcgaaatcgtagaggcttacatcaaacgtctgaacgatcttgaacaattggctatggcttatccgggtgtgaccaagacatacgctattcaggcaggacgtgaactccgcgtgatcgtaggtgcggataagatcgatgacaagcagacagaaagcttgtccggtgaaatcgccaagaagattcaggacgagatgacttatccgggacaggtgaagattaccgttatccgtgaaacacgtgcggtcagcttcgctaaataagtaaatattcaaaagaagattcaatacaagggcgaagcaattcgccctttttcaatttatcatcattcacttctcatgtttgcagcatcacgcagcagcatacagtctaaaagcatcagcttatgaaaaagtaccaatttgaagtctgtgccaattccgtagaaagctgtctggcagcacaggcaggcggagccgaccgggtagagttatgtgcaggtattccggaaggcgggacaactccttcttacggagagatatcgacagcacgcgacatgttgacaacgactcgtctgcatgtcattatccgcccgcggggtggggattttctttattctcccatcgaagtgagaacgatgctgaaagatatagaaatggcacggcagttgggagttgacggagtggtattcggttgtctgacggcaaacggggagatcgaccttcctgtaatgcaagagttaatgaaagcctcacaagggttatcagtcacttttcaccgtgcttttgatgtatgccgtgatcctgaaaaggctttggagcagattatcgaactggggtgtaaccgtatccttacttccggtcagcaagctaccgccgaactaggaatccccctgctaaaaacattgcagatacaggcttccggaagaattatcctgcttgccggatgtggcgtgaacgaaaagaatatcgcccgcattgcttcggaaaccggaatacaggagtttcatttctccgcacgggaaagcatcaagagcgatatgaagtataaaaatgaatcagtatcgatgggcggcactgtacatatcgacgaatacgaacgaaatgtaaccaccgcccaaagagtgataaataccattcaggctataaaaagctgaaaactgcgataaacagcgatttatagtcctgcaatagcatacctgtttataaataagggataatcgtaatataaataccggtaataatagccgaggtgattactcctgagatattggctcccaaggcatctcccaatacgaatgaatcgggattgtctttgcttactatcttctgggcaacctttgcagtggtaggtacgcaactaacggctgcgataccgatcaccggattgtaatttccccgtttgacaatgtacatgatgtatcctccgataatccctccgataccggaaagtaaaagtgcgacgatacctaataccagcaatttcagaatcttcggatcgagcaacagatgcgcatcgcaaagtacgcccagcaatactcccaacataaaggtcgagccatagagcaacggaccactgacaaaatcataaatatgcttcataccagattcacgaacagcaacccccagaaacagggagaaaaacaatggagaggcaaccggaaacaagaaacaaagtactgcgcagagaacagcagagaaagccagtttcactttggcatcgtaattcttcggtgccttcttggtcaccatcttaatggcacggaaacgtttgggcactaatagcttgaccaaatatggataccctccgtacgtcagccccaaatacaggtaagcgactactgtaataggaacaaacaaatgttttgccaaagccagcgaagtgaaaagcaccatcggaccgtccgcaccacctaccatagcaacagatgcgctttcctttaaagtcagtccgagcgcggaagcgatgggcacggtaaggaacgtaccgagttcggcacataaagcaaggaatatactcgcaaacggtttctggagcaggaagcccacatccagcaaagttccgatgcccataaagacaaagcaggctataagcccgttactgaaagtcagcgtgtagacaggttgcagaaagtctatctgcatcgtattcatcaggtcatccgtatccgaaagcatcggatcgaggaagaggttacctaatgtaccgtccggcatcatcaatgttccgcagttgatggctaccatgcccaatcccatcggaatcataaccataggttcgagcacacccttccaacccagatagataagtaacaaaccgagaagtaccagaaagactctggcagaagccagtaaccagccgctttccatcattgtgccgataccctgaaagagggtggcaaaatcaatattttccataaataaacgtcattttattgtttgttggtagtagatttctttgtatttttcttgttgacatgcgccagttcttcttctttgagaaagaactcacgtgtatcccgcggataataataatccatcaggttctcttccgacgcacccggacttactccatgataataaccggaatagccagaaacattccggttgattccacggctgaaatcttcgcgataatctcctaaggtcccttcgtccggaagaggcatctgtctgacaagcctttctactttctgccggtgttgtcgccagcgatgtaaccgcagcagttccagacggtgagaactataaaaatcaaaagaatctgccgcataagcaatcagtttgatgactgccgcaacaaaaaaaccgatgagaaaggtgagacccatcatagcgaaagtagatagtaataaatcaatcatagcaataaaaaatataggttttataatatagtattcaaaaaaaagaagaggcgcccaatggtaaatcattattaaaatttagacacacatgaaagttaaatcccattgggcactcctcatcacccatatagaaacaatcggcagatgttatttgcttgaatcacttcggtatacatctttgcttctatacgacgtaactcccgtttcacaacgaaaacacaatatcctgatcccgatacttgattaggtatccgggaaatatatcacacgtttataggaacaataaataaaaggaggggcagagagaaaagatatacctcaccctgccaatggaaaaataatgcagcctaaataagaatatgggctaatgtatagacgtagtatttacacgaatatttagtgtaattgacatcagaacaggtatggctcagacgttcctccggaagcaacgtattcagtgagctcaatatctgtattattgcagtatttgtattaaatctcagattcttgaaaggaacaatgcttctcggaaaagagaggttatcaaaaatgcagtcactgaccttactgccgtaagttccgtcagtcagcaatgaatgagtatctttacatgatttatcgaaaccggcagaagagacactgcaatttactcccgcattgtattgcatatcaattgccgggacctcagtttctttctgaaatccctgcaattctttattggaaatatgagtaaatcccaaagccagaaatgcgcatgctaatatgcaaaaaatgtactttgccataatttgctgcaaacgtaatcattcttttccaaaaacaatgtattaatggtaagaattaacgattattgcactctggctcctctttataatccatgtactactttcatcaattgctctcccagaccgatcgtatatccttgagaaacaaagaccacacggttgaaggtatcggcaatgataaagacaggcagggttgattgattcaacttcatcgcatcaacaatctgtttttgaatgctgttatccacatcaatgccataaacaatggtagagggaagatctttaaattcatgcgtgttgaactttttatattgctcttccgaagggaaaagaaagaccattttacgtccccactgttcaaactcgctgcgcaaagccgcaatatctcttaaagcatgattggtaggctcctgccccactccgagaacagcaaccacaaaatagccgcgtccgcaggtttgcaggatactttgcaggtcagtacctcctaccggacgataggtagcttcggaattgaaattaccgatcacttgcacctgatctttactttcacgcatcacaagatcaacagtagtcgtcttatccggttcgatagtgaagaatgtggtattggagagtaccgcaccactagccaggcgggttccggtcaccatcatataataaccttcgtccagctttactccgtttttcaggagattcgaccacgtagcaccaccacccatatctacatcgccttcgtcataattgagcagttggaacgtgccgttcttaaacttggagatagtgaaatgagaatagtatttaggatcggataaagaacgtatcggagtatagctggctttcaacatgccggtacgaggttgcgtggactgcgaagtctcaaaattgacatcctgcggagaaagtccatcacttgcatactgaaccttcccggtcacttcatcaatccaggctggtatccctatgctccgggcagctgctacgaagaagatatcacgggacttctcatcagctacacgcgacttccatactcccatcggagaaacaggaatctgctgagaattcagttcgttatcgatcttaatctcttttctgcaccattctattaatgctttggcatcatgagcagcatcaacaggtgccgatttcaagactgcttcagaaattgcatcataaagtacctttttataaggagtcaacatctcattcgctatgcgaggattgagcaacgcccttttcaccagatcagcgtccgttttttctccatctgatgtgtttttcagatgatcgttcagtacatcgagtgtcacgtcacgaagatcttttgccgagatattctctaataaccacataccccgcatttcctcccatgaaatatgttttttctcctttctgatagctgaaagaaaatccttcaatgtctgatggtttccgcgcgaagcaaccagaaaagctgccaacttatctttcatagtttcaggttgcaatatatttccgtacagtccgttcacccattcttttgcctgttcatctgtcatcatcgttgccacatatgcattgcggatcgaatcttcctgtgccatccggtggtcattttccgcccgttgttcaggagttacttcgggaaggttagccccttctaccggaggaacaatatccatcggaagtgtatagctttcaccttctttcttatctaaagataacttcaaagcattttcttttccaaatgacagtttagcatatccgaattttccatccctggatgcccataccaacatatctcccttgccggcagtgaggaaggctttaccttcggcatcggtatatttcgtggctaccgtatagaactcagcataattgtatatcttaaattccacttttgcacctgataccggatgtccttccgtatccgtcaccgtcactgtagctttggcagtaggcgcataattgtctatcacattgatctccgtgtaattcggcgtttcaagcataatctcttccggaccggtatagcgaccgaacacctttgtatgcatcagcatcccgcgactggcaggagcattgaaccatccgagattcaaaaccggttcgggctcgcaagctccgaagaaataccactgtccatccgcccacgcttctacccaagcatgattatcatccgtatgcgcccaacggggagtatatacctgccttgccggaatccccaccgaacgcaacgcagccacagtaaatgtggattcttctccgcaacgtccataggctgtcttcaccgatgccaacggcgaactggtacgtgcatcacttggacgatagactaccttttcatggcaccaatgattcacttccagaatagcgtctttcatggacagatgcttcaccctatccttcaattctccataaaacacccgacgcgagtcatccaaattctcattgttcacccggataggcaacacaaaatgccggaacaattcatccggaatctgatctccccaaggcatctcggtacgtatttgatcggatagccggacattctccaaataataatctcccgaataatccgtcacatcccctatcggcatataagcatagagaaacatcagggcttcctgctcatatacagacaagtcaggattcgaaaagacagtaaacaggtctccatgaggaagtgcttgctttttctgctcaaagtcttcggtcacttgattccgataattctcttctttcagaaaatgagcattgttgcaggcatacagcacaacagacaggataagaacggataaaagatgaatgaatgtcttcataaaagtgtttggtttatttttagataataagattgctgattcacaaaaatacaagaatattttctgaatgcctagataagtatataaaaatgtgacagataagaataatattgtcatcggagaaagaggacgggaaatttgtaacaggtttgtaacatctccgtgtccgaacctcctataaaaagaaaaatcagaagaaaaagaagatttttatgttttacagcatataattcaaaaacattttgtatctttgcagtgttaataaagaaaacaagatgtaaaaccgctcttcaaaacgtggagggcaaaaaaagaggaaacaaattatgaaaaagaatgcaaatgaaaaaatcatgatgttacagtaccgtattaaacgttatcaagcaatgggaaacggtgctatgtgccaaaccttgaatggtaaacttcaaaaactgctgacgaagcagccagccatgtaattaaacacactaatatatatcatgaaaagagcggagcaaccacactggttctccgctctttctttttatttcttcttcaaagtcacatcactgatttctactacaccacccttattctgtccaagaatagccacgtaacagtctttcaggatagcagcgtcatcatccgtatcggacacttccagagcaggatttgattttttgctgctgatagcattcactacctgtcccatgtcatagtaaacaaccaccttcgtccatttgccggcatccttgattttgaagttgtactgtgcaccggaagcattcggctgggcatcagcatcgtaatccctgcgcataaagaaagtagtgttaagcttgccgttatcatttttttcctcgttcgtctgcttgatatacacgctgaccggagttcctgcctcctttgcttttgcataaaaagtcagcacatagacacctttctccaagccgtctgtaatacgttgaccaagaaacgctttataccaggatgtattcttctcagcacccgaattatctattttcatcgcgttcggatacttggcatctccggtctgctcccaagcaattgttgtcactccgtccgcctcattattcataatgaaccactcacctgccgtagccttgttagggttggttaccttgttcgttacttccgtagcaaacttttcatttttgatcagattctgcgcactgacgcttactcctgcgatagccaaaagactaactaataatacttttttcatcttactgcgattttattgtttatacgttatttcttattttcactctgcttactgaatcctatttaatttgttgaataacaaacttataatttccagtttctttcttttcgtttgtttttagtgtgatgcgataaatctccttaccccatacattagagaggcgcggatcgtccaattggattgtttccagttcggctttgaactgaatcggatagtccagttccactttctgcccctttacttcaatctgaattttgcccaaggacgggaaagtgacattgccccaagtcatgaaattcacctgattgggagctacggcctcatccagcgtgtagctgtcggtaatcgtcagtttccggtcatccagtgtatacgaccggatccagcttttcacttttgcttccgacggataggcggcagcaatatcagtagagaatatgcgtttcttttcattgcaaatggtatttgtcgctttgtattcctgtccgtatttctgcggtataccattaatcatcggcagattatgataattactctgcattgtccagatggtgtaacggtctttaccgaatgtctgcttggtatatgtacctactcctgcatcaaggattacgggaattgtattcacatataaggaaaacgttcccacatcattatgattatgactttcgttgttgaatccgcctttggcagccacgaacattccattcttattcttcatgtaacagaactccgtttcgggataccaagtcacgtccggcatatcatgctttggagtctctttggcaagatcattgcagcagagcagagactggagcgagcggaatgcatcattccccatggtcgcatacggttttctaccattcagcagataagctgcaaaatgcatcatttcatcgctgtttaccgctttaccaaaacgatagatcaacagaggatcgccaccaccttgcgcggaagcatcggcaaagttcaccacccaaccattaccgatataagaacgggacatatactctcccatacgccggatcatcggttcattcaacagggatattttaccacctgtaccatcagaaagtatttgcaaataatcataaagcttacctgccgcgtgtccccaataagaagttccttcttcgcaagcaccgtcagacttcacaaagttgataaacttatccaccgatttcatcgaacggtatacagcttttgccaaacggtctttattgttctccatcaaaaggaaacactgcaaagcattggagttgcaccaaggattccagttattgataatctcgcccggctgccagttgaacgccatccaccacatatcgtcatcgttcatataagggtcaaggatacgctcctttatagctttgcgcatttgcagagaaaccaccggattgattttgtcgaaaggtttacggaagaaatagtgcacccaagccatcaatgcaccatatccgccggaaccaagatcaatgatctgttcgcggaaatcaggaagagaacgtttgctgctttgccggggcaggtgagcagacagtacccatgaattcatttcgcaactcatataagctccgttgagcagctgatcgatgaagcgtcctttgccttccgccagttctgccagcatcagcgtattcaatgcctgacggttggcgtcatagggaacttccatgattttacgattaccggtccgctcatattcaagataggcggtagcagggatcagttgccatttataatcgaggagcttctcgcctgccgcgataagacgctgcttgttgggccccatcaatgagtcccaagcagcacgatcagtataggccggataaggtacccatgcctgtttcattaccagcacatttttcaacgtagtttcatctgccgctttttgcagcatatcgcgttctgtataggcattggctttgaaagagaaacttccaaaggtagctaacagaaaaacacaaattaaatgcttcattcgattcatggtattttgttcgtttaagtatggcaaagataacgcatctctcaaaaagtaaggtgagcaaatcatacgaacctcatgacaaaaaagtacagacttcaaaaaaagtacatccagaagctctcagccctctcgtgaaacagacgctctgttcaaagcaaacagaccttctatttagggcaaacagagccttcattcagagtaaacagaggttccgtttgaaaaacatcctgttgattataaacagaaacttcatttgagcttctataaaatctccaccgatggtaaaacctgaactttattcccaatcgctaaactcaaaactgagctgctcccaaactccatgctgttcatccgcctcctctttcggattggaaacagaaagcccgatcaggcggataggatgctgttcgtactccacacttttcaataactctttagcgagtggaagtatgcggtctaatgtatacagctcctgcgactgcgtaatacttcgggttatctgactaaaatcatgaaacttaatcttcagagtcaatgtatttcctttaaactctttacgttgaagacgttctattaattctaccgctacatgatacaattcaatgataacggaagaatgaaccgatatatctctttccagcgttcgttcacaaccgatagacttccgaatacgaaccgcctcaaccggacgttcatcaatccctcgcgaacattcataatagagtgcccccacctttccaaagtgggccgtcagcatttcgagcgagcatttacgtaattgaagaccattgtgaataccaagcaaatgcatcttctttgctgtcacaggtcctactccccaaaaagactcgatcggaagtccggctatgaagtccagcgcctggtcaggatgtatggtacacagtccatccggtttccgatagtccgatgcaatctttgcaagaaatttattataggagactccggcagatgcgaccaggttcaactgttcccggatacgaagttttatctcctttgcaatatcaactgccagagagattcctttcttattctccgtaacatccaaaaaggcctcatccaaagacagaggctcaattatatcggtatactcatgaaagatttcgtgtatctgacgggagacggacttataaacatccattcttccggatacaaaaataagctggggacataaacgtttcgccttctgagaagacatggcagaacggaccccgtaacgacgggcttcataactggctgctgccacaactccccgctcctcggcatgtcccaccgccaagggtttgccacgaagttccggatgatcacgctgttctacagaggcgtagaaagcgtccatatcgatatgtattatcttacgctgaaacacttgtattcaaattccatagcaaacttactataattttccgaataaacagcctctaaaataatatgcacctatttttttagaggcacaggacataaaaaagattcgatatcatagcgattccatttctaataatactatatttgtatattgttatctataatctatcaacaggaaaatatttgaaatacaaaccataaagtaaatttagtattatgaaaaaactactattctatttattcattctatgcagcacttccatagttgctcaaaatggaattacttttgaagttgaacaactctccaagcccgaaaaattatatcccgtggcttcccctgatgaaatctacagatatctgatgctatttgacaatgaatcaaccattcgaattacagaaaaagacatctggaaacctccatttaatgtaatagccaagagtgaatctcctgacagtttattatacttcgggtataattcttttttctgcggtatgtatcaggcttatgcagatcataggccgttcgttttatctccggatatgatttggctactgattaatcaaggttttgcccaacatgtgaatgccaaccatgagtctttgagaaaatattttgtaaatttctccggaaaggaatctttaattgtacaatcccataagaaactgaaagacccgagtcttttatgggaagaaattttcccgcagtttacggaacagataagaaaagaggtaggaggccatttggttgaaacactcacttgtaatttctctacaacgacctctttggaaaagactgtttctgaaataacaataatggaaacggtaaaatcatacttcgagtttatcaccataatgattgtttgcggtattccggaaatcacgcttgaagggacaccacaagactgggaaaaagttttaaataaagccagaggactaaaagaatataaactcgaatggtggatttcacaacttgaacctcttttggaggagtttgtgaaggcatcaaagggaacagtaaaccaagagttttggcgcaatatgtttaaatgtcattcgccaaagtcatgcggagctcccgagacttttgatggatggatcattaaattctttccttacgacaatgaggggaaaagaaataatctaaaacagattgtggggcgtaaaaagcttccgagcgagatagtaaaagttgatttaaagtatattgaagcatacaatgacaccgtaattgaaacaccactggagttgtggtccggtttcatcggactcaaacaaaacaatgagaattttgcactgagaccacaaattggctggatggtcaaaaagaaaaacacagacaacaccggactcataaacagattgaaagccgatgccaaaggcaggggtatcaaccttagagtgaaagagttcccttccgtcctgctgaaacttgaagaaataaaacagttggagcttacctttattaatgaaattgatataccggacgaactgtcaaaagtgaaaatcgaaaggttgaagctatccggcagaattactaaagaagagatgcaacgtatcaaaactttatttcccaataccgacattaagataaacggaagtagaatataacaaaaatattaccgagtaattcacagaaacataaaaggaataatctggatttcatataaataaaaaataggggctgaattctgcattgagaattcagcccccgctatttaatctacctagaaaacaaacctatatttattcaagccgaaccctcatatctactactgtcggctctacaaaagactgactaccaccggtttcaccacgcaaaccattattggaagttgcgtcattatgattcggcgactgatcgagtacataccacactccgtcccgttgttcgatgtcttctccattcagcttccagtaaccgaccagaccatctgaacctgaatcgacaaacatcatattttcacgaatctgattcgcagtacgggctaccgaccataaacggacttcactcataaatccgttccatttacgattccggtcatagtcataagcataaccgatacagaaacgttcgttcaagtcgaatgtcagtgagcctaccgtcttttctgctattttctctccattgagatagagagtagccattcccgcagaagcatcgtaagtgaacgctacatgataccactgattcaacaggaatatggatacatcgggcatctgaagtgcaacacttccggccatttgaagctcgttatcaggatgattcaagtcaccggtacgcataatcaaagtaccttcattgcccataatggtgcccagattcttccaacgttcggcataaaccaatgcttcgtaggtgacagaacccattgttttataagcagtcggcagacgtacatcaagccagcccggattgatacggtataccttatcaataataattggtttccttactacaatataagtcacgctcgaactgcttatcttttcaatgtccgtactgttcactattacgggcagaatatacgttaccccgtcttcccccttggtaatgttctttaccgacaatccgcagggatcagcatacagttcgcctgctttaatggtcgaagaagttcctgtcatttcatagttatcagtcgccagaagctgtccggtcgtcccgtgtttatgattgtagtcatccacaaggtcctgccctcctacctgatagttcacatttacgttactctttaccatcgttgaaagccgcgacaccaattcgcactcgtaggtatccgcttcaacttccactcttatcacattactttcaaagtaaagtttcggctccaacagatcgctttcgctgtcgttgcaacccacactagagaaagacaatgcaactagtgcacctgcatataagattttgatacgtttcattgctgttctgtattttcattagattgattgtccatatattcctgataagcctgcagattgatctgtatagcatgacgcacaaaattgtaatcacgggcattatcatagtcattatcaagtcggaaagcaccgacgccacctttcggtccattggcatggttataagcagcctgagtcaaaagtacaccaccggtagtccaggatgactcaaagttctctgtaaagatgtgcttacgatagtcataatactctccacaccagctttgcaaggtactcactcttcggtcgagattggagtcgccatacgcctgagtgatgaaatagtcaaaataaggagcagattctttgttagagttccatatttcaccgtcaatcataaaatagtaatacttaccattcggacgctcggttgccatcggaccaaagtattttcctatctcttctaccagataatgcagaaactcaccacgcggaccacccctgcggtctttcagactgcctacgtatcttccgccgtcaccaccattatcgggttcccagtcaatgtccagaccatcataatcagtcgcaacaatcgtgtctaccaatgctttggcatagcgttgaatggctgcgatatggtcttcagcacctttctccccactggtaaatccccaataagcttctgttgccttattgaccagttccgtgatttcctcactggaagcattcgggttttccgcctgtactttttctgaaacggaagcaggcgtaataccagttccaatattatgcaaaatgtaacaaaccgtgatcttaccgcctttcttcttttggaaaatctccttatcagccagtttcgcttcattcaagccgaatggaccactccacatcgataccatgtcgatgctgtctggcaaagaagccagatatcctttacgaataggcccttcgggagaccagttgctgaaccatccgaagaaaataggacgtccgtaaccctgactggttgccttccatgcacgaagatcgacataatactgtgcactttcttcattgtccatcgtgttgtaaccgccgatatgttcaaaatccttgctctctatatcgacacacgacgcaatcattatccctataacaggaagtatatataatattcgtcttaacattttcatatgaatcatagtttaatagatttgatttttacaatcccaccacaactgagtagttgctttgtctttatcaagaccgcccaagagcttcaaagcttcttcatagttggctctatcctctgccgactgatagaaacttacaggatacaccatacggcgaatacctccttcacgagtaataccctgtccgcggttggtctgcacctggttcagtttcggataaccggttcttctccactcagtccatgcttcgtgaccgtttggatacaatgcaatccacttctggatcatgatcttctccagtttttgttccgttccaccgctgaatgcgggtgttgcagtagtaggagccgcagcgttgtaactgtaatatgaagctctcatattatgggctatcggggtcaaaccggaagccagatagtcgtctacagacgaactgataccattctcatcaaatgacgtggctactccttgttcgtacagtgcttccgcatcaccaaattcgcctccccatctcaacgcagcctcagctctcaggaaatagacttcggaagcacgcatccagtaagtcggggtattagaggtaatattaggtttggagaaatcggtataaatcgtattctgctgattggcattgccgggaggcaccgcctgatagttttttccgtcaaaagccgctaccgcatacgcgctgggagaagcttcaaaataagcactcagtcgcgggtcctgataacccaacaaataagagaacatggaagagcccatgcggcactcattgtattgattggccagccaatcgatgttgttacgaaataccattccggctccggtgctcatctgtgcctcgtccgatttggaagtcatcactccaaacggatgattcaaagcctgacgggcatatttctgtgcagtcgtttcgtccgcataactgatacgcatcgccagacgcaacatcagcgaattggcgtacttcacccattttctcgtatcaccggcatatacggcatcataatcggcaacaatagttgccccttgttcctctctcactgtcaaagcttcaatagcagccgtcagatcggtaaacatggcattgaatgcaacttgctcgctgtcgaaaggtatcaccagtgcaggttctcctgcgtgggtgtaaggaatgggaccgaaagactcaagcgttttgtgccaagcagatattttcagaatctgagccaaagcaaagatttccggtgtttcgttcttttcggattcttgttttatcttcttccaggaagacagcagtgtcgtatatgagttggtgtaggtagccgccacccaactgtcctgcaagtaataggtagtattgttgctaccgctataccagttattattctgtccgaaaaatccgctccacgaatcggctgacagattgtatgcaacctgatactggttgatggcctccgtatcgtcagcctgagttcctacggtgattacagctctttgcatcgccataacagcacctccgacagcaacaccatctcttatacccatttcgtcggtcatctcgaacggattggtgtttaactcttcgaagtcacaagcagtaaagagcgacaaagcgcaaattcctgctaatagtttatattgatttatctttttcatgggtcagttataatttaaatttaataccgaaaccgaaacttctcacactcggctgcataaaatagtcattaccttgaccgtaagttcctacggacggagtcagttccggatcgtgcggagctttgctgtagagcatccaggggttattggcaatgaatgacaaagtaacatctttcagcacattcttaaaccaaaggtcggggaacctgtaactcaaagtcagttcttgcagacggatattggttgcactatatacataatatccggaagtagtatagtcgcccgtacctatcagctgataatacgactgtgcatccactcttccttgcccgggcagcaagacaccgcctgcatcacgcgcttcggcagacgctttggatactccgaagcggtcgaggatagcctgagtagaagaagttaccacaccgccgaaacgtccgttaatcaggaagctgagtccgaatcctttgtatgacagcgagttgctccatcccaagttaaagtccggtgacgtcttgcccaagaaaaccggttcaccttgttcgagtccgtacgagccgtcttgcttgatttcaacatacccctgactgtctttcttcaagaaagtattggcatatatatcgttgatgctgccgcctacttttaatataacgcgtccgttgtctttccttacttcgggtacgttgatgggctcggggctcatgtcagtacgatagttttccaccatttctttgatttcgttgacattgcgcgagaaggtcagattggaggagaagctaaagtctccgaagctgtctctgtatcccaacgatgcttcccaaccgtgattttgtacattaccagcctgcaaatagatttgtttataacccgaaaattccggcaaatcgccaataaaggtctgattgtatgtattcgatttatagtaagtaacttcggcactcagtttattccataaacgtacactcaatcccaattcataagaacgggtacgttctgccttgaaatcagtaaaaggatagatgcctgtgggagccagtgcaccaccgataatcggagtggtcacagttcccggagtaagtcccgactgtgataccggagaaccgacttccgtataagacccgcgtacctttaaataggaaatgaactcgggcagtttcaccatttcagagataataccggacagacctaccgagggatagaaaaaggattcttcgctggtgtttaccaaccgggagttccagtcattacgacctgtcaatgtaagataaagcatacttctccagcccagttcgacgttggcaaagatagcgtgattacgtacgcgactgtcacctccgtcttccgagatacgaccgttggaagggtcgatgttgctggcggcaaacaggtttgttactccgagcaaggttcctttgtagcctcttgccagcgaccagtagttagagtagctataacccaagttggcagaaatattaaaatcgttgaactgcttgttgatatttaacataaagtcggcatactcctgacggtctttgtaattgctgtaatcatacagacctttctttccttcggcaaatttctgatcggaagtagcataaaccttacgttcaaactgaacatgagtatcgtccatacgataacgtccggcaagattcatccagtcggtgatcttatagctcagaccgacattaaacatataacggctcttctcgttcgttgcgatgttgcgataagcagtccagtacggattctgcgaaccataggttgcatcggcaatcggccaatactgtatcggaatattgcggctctggtcataacgctcgaaagtcttgatatcttcgaagtcttctccacgggggaaaaggtaggcagaaatcaccggattccagtattgtccctgcgataccatgtttttatcttcctgtttcacataggacgctcctaaatccaactgcaatttatcgtccagaaaagtggctgtattgcgaatggtgaagttcagacggtcataagaattgttgggaacaataccttttgaattggtggatgaaaccgaagcaaaagtttgattctgctttgtaccggtagacaaggtcaacgagttgataaagttggttccggtgttgaagaaatcactcttgggatcatacgaattcggacgggccagtttgtcaccccagctttcgaacataccttctttatttccatacgtgttctggaattcgggcaccatgtacgctttgctgaattcggatgaagaagaaaatgatatctgtaatttgccttcctgtcctttcttagtagtaatcagaacgacaccatttgccgcactactaccatacaaagcagcagccgaaggtccgctcagaatagagatactctcgatatcttccggattgaaatcagcaataccttccgttccggctttgccttcacccatgataccactatctgtgtttcccatattagtattaaacaaagggataccgtctactacatacagtgcattgttgtcgccttcgatagatttagcgccacgcataacgacacgcgtcgcaccaccgacaccactaccactcttgttgatacttacaccggctatcttaccattcagtgaattgatgaagttggcatctttaatgccggttatatcctcgctttttatctgctgcacattgtaagacagtgccttttctgcccgcttgatacccaatgccgtcacgactacttcgtccagcacttccgtatcttgtttcattgtaatcgggtaaaagtccttattggaaacagcaatcagttgagttgcatatcctatataagatattttcaaacgggcattaccgggacttttaatcgaaaagtttccgtcaaagtctgtaatcgtccctgtagaactgccgtccacagagatatttactccgatcaggggttcaccattctcatcggttactttccctttgatatctttgacagattgtgcagctgccggtttcttctccgtaactataatataattaccttgaatctgataagagaaacctgttcctttcaagattgcgtcgagtgcagtagtcaccgatacgtcttccaagttaagatcggcaattttctttcccttcaattcggaatcactataatttatagacatcttcgactgtctttccacagttttcaatgcatctactacagtgatatctttctgctggatagtaattttactatcactttgagcaaaagcaagggtctgcatcaataatagacctaaaaaaatgagaaagactcgcttttgaacaacattatctgctcttttttcgtaaatttgtagcatctttttagtattagttaattggttattattctatgatcaattgaaatagcgtcgagatacgctaatattagaaggacaatgatttcacatccgggagaaacggccatttcttccggatacttttttgcatagtacattaagttaaaaaaggttcaacaatcgtttttctatattttatcagttatatagcatttattccccttaattatatatttcacatcccctgccacctgcgttattatcttcatcacctcttccaaagtggcttgctgttggaaacggaaactatacgatttattgttcaggctgtgaaggctataaacaaaggtatagggaaatttgcgttcgagactcgtaaaaatctcatcgagatgcatatcactgaaaaccagttctccacgctgccaggcagtcacatcctctatccgaggcgattggaggctacgtttccgggtctgtttattatacgttatctgctcattgggtttaagtattacattagatatcagattattaaattctaccttcacactaccttccagcagagttgcaatcagttcattgttctccggataggcattcacgttaaactctgtacctaaagctgttatttgaaaatcattggctttcactataaaaggatgtttttcatccggctttacctggaaatttgcttcgccaatcaaatatacacttctggtcttaccggcaaactgctccgggtacagtaaggtgcttctcgaatttagcatcacccgggtaccatcgggcaatgtaagttcacgtatttccgccgttggtatgaaacattctaccaagtctttttgcagtttgtctttctccaacatcagatagatagaaacagacgatactgccaacaggaaaatagctgctgctctccatataagtaactgatactttttaccggaaccgacagactgcattcccagattttgttgcatccgtaatatggactgttgcattccgcgaggtactttctgttctcccgcttgttgccacaacgtgtgaagtgcttcttttttttcttccgcatgattgtcgtcagccaaccatcgctgcacttttctacgcgtagccaatgaatactcattatgcccgaataactctatgatctgttgaatatagtttttcatcattaatttcttcctttatacactaaatacaactaaaagaaaaacactacttaaaggaaaatagaaaaaataaaaatagaagcactttttttagttctatcagtgctaaatacacctggtgctctaccgtacggatggaaacattaagcttttctgcgatttctttataacttaatcccttaaaacgactcagctcgaatattaaccttcgccgttcaggcattttttccaaagtcaggcgaacaaccagcaacatttcttcataatatatattattaagggcatcttccccttctatcaattcatgaagtactgttttctcaaggtatccttcctgatattcccgttcgatttgctgatgcttgaagatattcagaataatgtttctggtcattataaagaggtagttatctaattcattttcattgtcaagccatatttccggttgtaaccaaagcttacagaaaatatcttgagcaacatcttcagcatcaacttccgacttaagcaacagctgggcataattctttactttcggaaaattagaaataaaaaaacgctgaaacttcagctcaatttggttaacattattttccatatccgctaagattattatcgattacaagtataaaagtagacattctcaaagattagaacataataaagatatattattaatacttgtttgcctatatttataattattccgtatataaaacaaaaacacataaatattaacaataccaaatagccatattatcataccaaaagagaatagagtgataggatgtataagaaattgactttgtatttaaaaagagataaaataaaggatcaacaataaaaaggggagtaaaagagaaaaactgcaaaaagaaaaagctctgataatcagagctttcatttgtttttttaagtggagctggagggaatcgaaccctcgtccaaacgaggaaatcataagctttctacatgcttatctttgcctaaattttcgtgcaggagcagaaccaaagccatcaattcctgccttatcctctaaagtttcatcaaaaacgcgaggccgcttctgactatccccgatgttactgcaccactgaaccggaatgcttcggagcaacagcttccgagtgatgtctcgtcctggcacctagtgcctggattaagctaatctactgtgattcgattaagcagcaagagcgtaattagtttcgccagataaagttttgataactgagatttaagtggaaattaccgacccactgcatgcttacctaccatttctgcccgctgtcaaatccagtcaaccccatgactttgtaacggtctgaaaatcaaaagaaaacaatcgctattttatatttgagaaacaaataagggataaataatgcatcatatcctttcaataatcctgttttctttggcacaaagatacatattcttttgttactaaccatcatatatttgcaaatattagccgatgatatgctatccggtatacagagatatatcatgagcggaggcaaacttggctcccaaacatacaacatttgtaggcccggttatttccaacttaccaacattatccgtacatttgtggaatataataaatactatcaacctcaaaaaagcaatggaagaaccatttgattattctcaagtacctttcacattcggaatgtgcgctgccgaaaattgcccgcaagcctcgacttgcctgcgacagatagctttaaaacacgcccctgcaaacaaagtttttctgccaattatgaatccaaaccatataaagggcataaaagaaaaatgtgactatttctgttcgaacgaaaaggtgcgttacgccaaaggattcatgtgcacaataaatgcactcacagtgcgcgtggcaaacacgttccgctatcagatgatcggatatctgggacgtaaaaactactacttgaaacgcagtggcaaactggcgctcactcccgccgagcagcaatggattataaataccgccaaagaactgggagtcattcaaagtgagtatttcgacagttatatagtagagtataactgggacaggtaagggagatttccgtttcaagtaaagaaacgacagtttcctcgtagagaaacgcaagtatccccgtagagaaacgaccgtttcctcgtcgggaaaccatcgtgtcctcgtaagggaacgacaaggaaactgcaatcatctattatacaagacattagtatagactaaggaagttgctatctaataaaaagaacctatatatgctaaaaacttttgcaaccatctgtattatcggtatgttcacatctagttgtacatcaaaaaaggcttcccggaccgaaggctcccatgaagcagaacaggacctgacaatgattgtcggtacttacacttcgggagacagtaaaggtctctatagtttccgattcaatgaagaaaacggaaccgcaaccgcactcagtgaagcggaagtggaaaacccatcttatctcgtaccttctgccgacggcaaattcatctatgcagtcagcgaattcagcaacgaacaagctgctgccaacgcatttgctttcaataaggaggaaggaactttccgactgctgaatacgcagaaaaccggaggcgaagatccttgctacatcattaccaacggaagtaatgtggttactgccaattacagtggaggaagcatttctgtcttcccgatcgataaggacggttcacttctccccgcttctgaggtggtgaagttcaaaggttcgggagccgacaaggaacgtcaggagaaaccgcatctgcattgtgtccgcatcacgccggatggcaaatacttatttgcagacgatctgggcacggaccagatacacaaatttattgttaatccgaatgcaaaggcagacaatgaagatgtttttctgaaagaaggaagtcccgcctcttataaagtagaagccggttcgggtccccgccatctgacatttgcaccgaatggaagctatgcgtatctcatcaatgaactatcgggaacagtcattgcgtttgaatataacgacggagagttaaaagaaattcagactattgctgccgacactgtgggagccaaaggaagtggtgatattcatatcagcccggacggcaaattcctgtatgcaagtaaccggctaaaggctgacgggctggcgatcttcagtatccatccggaaaacggtatgctgacgaaagtcggttatcaactgacaggcattcacccgcgcaatttcattatcacgcctaacggcaagtatttgctggtggcttgtcgggatagtaatgtgatacaggtttatgaaagggatacggatacaggattactgacggatatacgtaaagatataaaggtggacaagcctgtctgcattaagtttgtaccataaacaggaagaagtacttggttagcaccggactgaaacaagagtacgccggtcctaaccaagaaccaatacttcctaaccaatcagactacgaaaagcctgaataccctgatgattgatatccaatctttctacctcactcagcaaccgaacggatttctctttttcgttcaatccccaatatcccaatgccatcatatatttgcagtgaatgacgtttcgtatggtcaggtcatcttcccatattaacaaatcgggtagtgacactgcaaaataatccattttaaccttgtcaaaaagatgtttctctccgtaagttgtcagtttatggaagcgtccgttagcctcatccatgcggttcagtttcaacaaagccagtccctgatagaaaatcttatccggttttgcatcattgtagtacatggcagcagccggttcggtaggaccgacaatcgcttgttcccagcattccaccgctttgtcattctgccccagaccttcataagcgcaacccatgaaataatagaaatcattttcctgtgcaccgtgcaacttaccttcacccaagtgatgcggatattcaagacactctgccagcaacgagacagcttcactgtaattcccggcttcaagtgctttcttcgccagttccacacgggcaaactgatattgtcccggtacttttccttcgccgccttcccacggatggaagatatgcgcatcaagtaacgttttagccttttcatactcgcctgtctgattcagcaaagttatctcttccagtacgaggtcgtcacgttgcgctatcaattcggggtattgctgcaagaacgccagacgttcggaatgcggacgacggacacgtttatagagctgatccaattccatcaacacacgtgcatcggtcgtatcgagttggaaagcacgttccatatattcgatggctgttgcttcttcatcctttttgttaaagttagccaaagccagattacgccatatcgtagggaacttgtcgtccagtccggcggaagtttcccatgcttcgagtgccaaatcgtactgacgtttgtcgtagtacaaattacccagataataaggtgctttcgcatcattcgggttttgttccatagcacattgcaaagcaagaatggcttccaagcggttagggaaacaatagtccggacaagcaccggcagcatcggcaaatgcctgttccgcaccggataacttaccctgaacaagacaccaacccaagtaataataagtcatcggtgttacactgccctcagcgatagctacattccacaaagaagcggcttctgtccagcaaccggcagcacaataatcgagtgcgatttcatcatagttgtgagcttcgccacgcatcatcgtttttaaagtaagcaagtcttcggcagcattggttatcagatatttctcataacggcaaccgaagttgaatttatcaatagccaatgaatcttcaatcacttgcaaggcttcttccgctttccccatctgacggagaatggtcgttttcagagcacgcgctttatgattatgccagttgcggataagcgaacggtccacttcgtccaaagcgtcttccagacgtccttgcattgtagcaatctgagcacaggcaaaataaccggcatcctgccaggctgcattccagcatgatttatagaaacggtcgtaagcctcattatagcgtccctgatatttcaaggcaagtccgagattatagataggttctccatcatacggattcgggttgcgcttctgcaaggtcttcactgctgtaagcaagtattgttcagctttacggaaacggcctttacgaatataccataatccgagtgcattattgctacgtacatcgatcgggtcacggcgcaaggcttcttcgtaatagtctaccggattataggtggcgtgtctgtattgttccagatgtaaacctgtcagatagagttgctcggttgtttttatttcttccggtaacaaagcagcttcggcagcatccggaatcggttttacttcgtccggttcggcatgccagtaaagcagttccttgccgtttgcggtgatttcaagattcagtttgttcaacttctcccctgctacgtctaccgtttcattcaatagttcttccggagtaatggtcacttgcctgctataatacacttttccatcgtcacttttcagcactacattaactacctgtttagatgttgcgaatatcttgaaacgtacctccttgtcaccttccggttctatgttcatcaataaatctttgcttgcattcttcaccactcccagttcacggtaaggcaggaaatactgtacgaagctcttttcttcgtaaggttgcagccatgtaaagtccggctggttctcggtatagacacctgccatcagttcgatgtaaggtccgtcctcatcagtcagattgcggtcccatgcacggccgaaatcaccgttcccccatgtccattgctttttacccggagaaatatgatgatttgccacgtgaagcatacctgcacaagtgtcgttttcgtagccaccctcaaagttgtaacgggagttgacagccatgtacgaagtaggaactttgatattcttatagttcgaaatgtctactccggcagaatagtccatcttataataagtacccgttgctatagggaagctggatacggcacgctttccatgatcgaacaccgcattgatatcgggcgggaatacactctgatagtagtcgttcaccgctacggcaggattcgcccaccacaggaaggtttgcggcacttcggtacggttgtagagcaccccttttatttcaagaaaagcatgacccggacggagtgtgaagcctgccatccctttctgatgaaacatccgttccatttcgttcacccatacagtgacgctgccgtcagcattttcttcaatcgtcgtatctacaggcatataagtactgggacgatgatgctgaggccagttaaactcaatacctcccgaaatccacggacctgccagccccactaatgcaggcttaatcacgtgattgtaataaataaaatgacgttccctgatcttgtcataagccatttgtacacgaccgcctaactcgggcagaatcatcaccttgatgtattcgttttcaataaagatagcttcgtattccttatctactttttcatcggacatcgattcgatgacaggataaggataaaccaccccactactgccctggtagacacgtttctccaggaaaataggattcttttccggtttacccacttcataagtaggaattacaaccttttctctccatgcttttaccatgatattattgattattaaattcattttatcagatctttctccaatgtctccagcgatttcccttttgtctcaggcaacgcacgcaggaagaaaaggaaaccgcagacgcagatagccgaataaatccagaatgtgccgtagctgcccagtgcagtattcagcaacgggaatgtgtaggtaagcgtgaaactaccgacccacaaagcgaaagtacaggttgccatagcgacaccacgcacgcgattggggaatatctcagcaaggagtacccatgtgataggccccagagacatggcataacaagctatcgccaacaccaccagcactaccataaagaaaccgctgacctgaaaaaagtaacacgtgccgagaaccagataaatacctgccagtcctccggccccaaaaagcatcagggcacggcgtcccaaacgttcgaccgtatagatagccacaaacgtaaagatgacattcgctacaccggtcaccacaatattaaagagtacatcacccagcgaataacccgctgactggaatatctcctgtgcataattgaaaatcacattcgtaccgcaccattgctggaacacagccacgataacacccagtacgagcaccttacggaacggacgactgaacaacaatttcaatcctccttccgacttggaagcggaggtttgttccaccatctgaagttcccgctctgcatagcggtttcctcctatccggctgagcacactccatgctttctccctcttgcctttcattgccagccaacggggactttcgggaataaaacaggctagcagcaagaataccgctgccggaaatgctgctccccaaaacatccagcgccatcccatctgcccgttccatgaagcacagatatcggcaggcgtaaagtcggcaggtataggctcggctatcagccagttggctatttgtgcaccaaggatacctaatacaatagtcagttgattgagggacaccagtttcccccgaatggaagtaggagctacttcggcaatgtacatcggagacagccccgaagcgataccgatgccgatgcctcccaaaaagcgtgctgccagaaaccagctgaatacggaaaatgcaccggtagcgtatgcggaagataaaaagataaatgcggaaatcagcaagagaggtttcctgccatagcggtcagccatcataccggctaccatagcaccgatcagacagccaagcagggctacactcatagccagtccctgcatcgtcggcgaatcggcaataccgaaatagagttcatagaaaggtttcgctcctccgattaccacccagtcatacccaaagagcagaccgcccatcgcagaaaccaaacaaatggaatagacaaactttttattataacttttcataccactagaagattgattaattgatgttgcaaagatagagcgtatccaaagcacaaaaaatagaatttcattttataaagatggacaatcttatttttaatgtattatttgacagatcgcatacattattatatatttgcgcagaataaccaattatgtactatggtaaaactaaaagatggatttaccggggaaagagccttagtcctaccccgcatcatcgttgataaactggaagaggacccgctgacctccatgctgcatatcactgacatcggatattatcccaaagccaagcatcattttcgggaacggaaagagcccatcaatcaatatgtctttatctattgtattgatggcgccggatcttaccgaatcggagatcaggaatataccgtctccgccaatcagtattttattcttccggcaggagtcccgcattcttacgcttccaacaaatcgacgccatggactatttactggatacacttcaaaggtattcttgctccgttctatgccaaagacgccaaccgcccgatggatattcagcccgaacaacactcccgcatcagtacgcggatcaacctgtttgaagagatattcaatacactcaaaaatggttatagcaacgagaacctgcgttatgcgttttctatgtttcacttttatctgggaacgttacgctatgtccagcaatatcgtaatgcaggcaccaatgaggcagaagatgagggaatagtgaacgttgccatccactatatgaaagaaaatatggagaagcatctgagcctggaagagatctcgacacaaatcggatattctccgtcgcacttctccatgctgttcaaaaagcaaacgggacaccgtccgcttacttactttaatctgctaaagatgcagcaggcctgcctgttgctggataccaccgatatgaagataaatcagatatgctataaaataggtattgaagatacttattatttttcccgcctgttcagtaagatcatgggaatgtcaccacgggaatatcgtaaatcgaaaaaagggtagcagctatcggagcttattcttaaagtatatattacgaactgaaaggcacgaattacacggttttaattaataaaagaaccgcataatccgtgcctagatatttttcacaaagctatatgctttgactttggatacaatctctttgaatcaccacttcacaagtagcaaacaaaagagatatgaattatttcttctctatagtcagaacaaactgacgcagatagacctgctgttcttcatcactcacattcgtgaagcggacaaacttcacaggagccttctgcaaaccggccgacaatctgctatctttctgcttcagatccaccgttttccattccttgccgtccgtagagatttcaaggcgtccccatgtgcaaggagcatccttaccaaagtttatctgaatattctctcccggatagatagcgtccagttctatttcaacactgtttcctgctgcccatttcacaacttcattggcaggagaaatgagtacacggttcgctttcacctgcaacggcagattcttgatctgctccacattactgatcatcttatgcggcatataatcagtagtggcatccagacgagcattaaacttttgattgaagaatttcacaactgtggcaaaagtctggtcaatcaatggttttatcactcgcgtagctgtctttactcccggttgataaggattctgattgctcgtctgatcgatatagaacatctgttgctgcaaagccttcacatgattgtatttccgcagaaaataagattcattccggccttctaccatcttcagcacttcttctcccatttcagccgtcagtttaaactgatgcacccaaggagtgatttccgcaatcaacggtttgttctccgtattcatcaacaggatatcggcggattctttcatacgttcgaacgtatattgaagagtctcgaaatctgccttatcgtaattattgccttctttgaacgctttcaggaaacgttcggcagccggttggatatccatagattcttcgcggcggtatccgtgtccgttaggtcccaagtcggaattgtgcattgcaaaacattcaagttcttccgctgcacttggcagaatggtacggatcgcatccttccacgtctgccatgtatcatacttggcaggattccaggcataacttgccacactataaatcgctatctttgacgattcggcatgttccatcggattggttacgaagcccgacatctctttggcaatcgtagtatcgttgccatacacaggaccgagaagcagatgatcgcgcacataatcggacaccgggaagttccaccagatataagccggacgcttgattcgttcgttaatccacgaaatgccgtcacgggtaatatcggaaatgacacggtctcctgtccacataatctgaatggaaggattgagtttatcgcccagcgtagtcagataattgccattaggattcgaccagcttttattgtattccgtagggcacattaccagttggtttatatccggttttacctgtgcgaatttctcatcaatgtagttcagcagttccgcttgtttctgcggattagtgccttcgccggagatatcatcaaagaatacggcgaacgaacggacaccgagctgatacatcttctcaaacttagcgagcagaagatcacggtcttcctgattccatttgatatcctgtcccggatggatcgcccatacaaagtcaacttcgttttcgttggccaccgccaccaattcctgcaactgggcagcttctttgtcgggataaggcaaacgccagttgggagcactatgatacggatcatctttcggaccgtatatataagtgttcatcttgtttttaccgtaaaacttcagttggctaaggcgtgcctgatggctccagggagttccgtaaaaaccttctaccactccacgataccgtacagaagggtaatctttgatttctacttcgggcagctttccgtctttcagcaattgcgcaaaagtttgcagagcgtaataagtacctcgttcgtcgtttccggccaatacgatttccttttcattcacagacaggtaataaccttctttgtggtcaggaatctggcgactatatttacgcacactcttgtcacctttctctccaatagaaataagcatccctttcttgctgctttgcttaccggaaagcagttctttcagtacctttacagcatgcggattggcttcttccccgccattcagctgatagacagcaggcagatcgatggtcttgttttgaacaatgagttgttgaggagggggttgcagactaacattctgcgcaaaaacagtaacagcacacaggaggcaggctcccaacagataaatcttgttgtttttcataagttgtaataatgggggttagttatcatgacttatatcatggtgcaaagaaacactaatttatcaaattaagcaaatttatggggaaccttgatcaaacaaatcaaaaagagcaaacaaaataatcataaagacacacttttctaatttattatttctatcttcgtccgctgttatactttttatttaaatacccccaattaccatgaaaatcaaacattttctacccctgctattgctactcggtagcaatgagatgcttacagcacaagaaatcgctctcaccccacaaccggctcaccttaccgtaaaagacggccgctttgagtttggcaaccaacttaaagccaaagtcactccttatcagggagacagcatccgtatggtctttgaatcattcaaaaaggaattgcaagaagcaaccggcatcaaggtttcatctactcaaaaagaagctaaagcaaggattatcttagatttgaatccacaacttcccgctgaagcttataagctgaacgtctcgaaaaaacaagtccggatcgaagcctcccgtccggcaggtttctattatgcgctacaaacgctaaagcaactgatgccccgcaacgtaatggcaggcgtagcaacgtccgaccattcacaatggagtctcccatctgtcgagattgaagatgctccccgtttcgaatggagaggttttatgctggacgaaggcagacatttcttcggtaaagatgagataaaacgagtaatcgacatgatggccatctacaaaatgaatcgtttccactggcatctgacagaagatcaaggctggagaatcgaaataaagaaataccccaaactgacggagacaggcgcatggagaaacagcaaagtacttgcatacggtgacgtgaaaccagacggtgagcgttatggcggcttttatactcaaaaagatatcaaagaaatcgtagcgtatgcaaagaagaaatttatagaaatcattcccgaaatagacattccgggacattcacaggcagccgttgcagcttatccggagttcttggcgtgcgacccaagggataaacatgaagtatggctacaacaagggatttctactgatgtaatcaacgtagccaacccgaaagcgatgcagtttgccaaagaggtaattgatgaactcactgaattgtttccattcaattatatacatttaggcggtgacgaatgccccacaaggaaatggcaaaagaatgacgaatgcaagaagctgctgagtgaaataggttcttccaacttcagagacttgcagatttatttctacaaacaactaaaagattacattgccaccaaacctgccgatcaacaacgccaacttatattctggaacgaagtgcttcacggaaataccagtatccttggcaatgacatcaccattatggcatggatcggagctaatgccgccgcaaaacaggctgccaagcaaggaatgaacaccatactgagcccgcaaataccttattatatcaacagaaaacagtcgaaacttcccacggaaccgatgtcgcagggacatggaacggaaactgtggaggccgtttataactatcagccgcttaaagacgtggatgctgccttgcaaccttattataaaggtgtacaagccaacttttggaccgaatgggtgaccgaaccttccgttctcgaatacctgatgttgccacgtcttgccgccgttgccgaagccggatggacaccacaagaaaaaaggaattatgaagactttaaagaaaggattcgtaaggatgcagagctatacgacctcaaaggatggaattatggcaaacatatcatgaaataagcaaacgctttcatttgactgccgataactggggagtgactaaaaagtcggtagtatctcaattctcctccttcgggaaggaggagtacccgcagggggaggtggtaggtgaatacgcagtccacttattcactgcaaattatagacaaccctattttacctaccaccccggctttcagccacccctccttccgtctttttcagaccatctcagttctttcactttttattttgtgccacgcgattattattcgcctgtggcttcaccactaccccatttccattcttcgtacatttaatacattcctttcgtaatgtaccctccttcagattgaaaataagattcggattgaaatgctgaccgttaatacgggtttcaaaatgcacatgctccgtagtagcacggccagtacgtccggtcagtccgataggttgtccggcttttaccgtatctccgctctgtaccaaattcttgaagttatgactgtaaatcgtttccagcccgttcgcatgacggactacaaccaaatttccgtaagcataatacggcttcgacatacgtacgactccatcaaaagcagcacgaatcgtatctttggcacacgtctttatatctgctcccgaatgtcctccgcgagttccgtaagcggaaataactttggctcccggtaagggaaaagcatattcatgctcttgcagagaatccaaatgcagatatatatgattgcttttcgcaaaaagtccgggagtagcaacccgtacatgattcacctccatagaagaaaaagaggatttactttgcgcataagcaagagttggtaaaagcaggactgtcaataaaataagtatgttcttcatgtattcctttattattcaaaatagataagctcgccgccatccgatccggcataatccctcagtaaggattgaatcatttcagcagtttcctttaatccctcttttccgttatacccgttgactatcgcgagaatatgagtagtcccgatatccatcttcgtacgttcgtggtcgcttgtcggtgttccgattcctccaaaagaatctctgtacactggcaatccttcaatgttcaaaatgccccgaccgataccttcgaaaggttcttccgctttgccaatgccaagttcaagatggttcccctgtatcttatccgcatcgaagccaccgatagaatgtccggtacggagagaaaccaaattgataaggtcaaccaaagtatcaatctgatacaaagggatgccacgcatcaggcggcggcgcagcgcttctgccgacggacgataacgtcccgggtctttgccacaacgcttataagcctcacgggtagcagcaatcacaggttgcaacttaatgtctgccatttgggtggtggtagtcaagtcttctgtgaaagtatttatttctttccaaagtccatcgcagtaagcagtattcttcactgctgcatatacggctgctccggcaaaaaccggacaggcattctttatttcctgagatacttttatttcaaacatacttttattcaagtttatatcaacttacgttcaagtctattccaacctatgcgcttatttatgcaatctatgttcaaagctattatttatgaatcatgatccccgacagaatccgtccggacttaatgcccaaacgccttgccgagaaaaactcgtcgtgatgaatatacgtacatatccgggcaagctccacctgtcccgacggcacaccgaaagcaaggatttgcattcggttcgcttcccacaagtcgatatgatgttttccggcttcctctttcctgatagaaatacggggcatatcaaaaccattcttctgaaatgcttcgtacacttcctcacccacttcaaaagaagccaatgagatactcggaccgatacaggccaccacatcttctccacttgtgccaaactctttttccatcctcaacaaagtatcacgtacgatgtacgctaccgtccctctccatccggcatgaatggcggcaatggcaccatgtttcttatcatataccaacacggggacacaatccgcagtagaaatacaaagacaatatcccggctcacgggtaatcaatgcatctactccatgtaacatctcctgccgttgttgagacgaagccgataaataagcatcgccgatcagcaggcacttcgtctcatgagtctgcacaggaatcaccagttcttcgggtatctgcgacattccttccatcagaagcgtctgattccgccggaccttttccgcctcgtctccactgtaaggcgtacagttgaatgacgcataatttccctcgctgcatcctccctgccgggtagttacaaaatgagaaatgttggagtatgagcttaacgactcataccccaacattcttttatctcttgtgattgaaatcatttttcctcccaatcctcttcttcgtattcatagtcgagatcatcatcgtcgtcgtcagcgtcttcctcatactcatagtcgagttcttcatcctcgcccatatctttgagttcctgctgcaaacgggtcacgtctttcggacggtgaacaatgtcttctatcttattactttccttgttcagttcctcccacagaatgtctttcaacactgagattcccaaaccggaaacagaagaaatgaatatatgcggaacaccctcgggcaatgtcggttcaatctcgtccatcagctcctgatcgagcatatcgctcttcgtgatagccagcacacgttgtttgtccagcatttcgggattgaacgtacgcaactcattcagcaatacttcatactccttgcggatatcatcgctatccgccggaaccatgaacaacagcaacgagttacgctcgatatgacgcagaaaccgcagtcccaatccttttccctgactggctccctcgatgatacccggtatgtccgccatcacgaatgactttccatcgcgataggaaacaattcccaaattcggttcgagtgtcgtaaacgggtaatcggcaatcttcggtttcgcagccgaaatggcagaaagtaacgtagactttcccgcattcgggaaacctaccagtcctacatctgccaacagtttcagctccatgatcaccgtcatttcctgcatcggttcgcccggctgcgcaaagcgcggagcctgacgggtagccgtcttgaaatgactgtttccctgaccgccacgaccgcctttcagcaagatcacttcctgtccgtcgtccgtcacatcgcaaaggtattctccggtttcggcgttatacactaccgttccgcagggtacttcgatcactttatccgcaccgtcttttccgaaactacggttcttgctgcccgattcgccatgacctgccatcgcatgacggtcatacttcaagtgaagcaatgtccagtaattacggttaccgcgcaagataatatggcctcctcttccaccatcgcccccatcgggacctccgttaggacaatatttctcgcgcctcatgtgcgtagagcctcttccgcccttgcctgagcgacagtatatctttacgtaatcaacaaaattcgattcagccatattttttatttattataatttgtctaccgcttcgcagatatcagcgaagataccatccatagtacccagaccgttgatgtgctggtatttcttttcgttcttgtaccagtcgatcagcggagatgtctgtgaatgatatacatgcagacgttttttgattgtttcttcgttgtcatcagcacgaccggagtctttgccacgtttgatcagacgcaccatcagttcatcttccggaacttcgagatccaacattacagaaacatcctgtcctctttccgccaacattttctttaatgcttccgcctgtgcaattgttcttgggaaaccgtcgaaaattacacctttactatctttgaagctatcgaatacgcttgccagaatatcaatcatcaattcatccggaatcaactgaccctggtcgatgtaacctttagcagttttgcccagttccgtgccgttcttgatttctgcacgcaatacatctcctgtcgagatgtggttgattccatacttttctacaatacgttcgctctgcgttccttttcctgaacccggagcaccgaaaattacaatgttcaacatctttttaacctaaaaattaatttgtatttgaatttaatctactacagtataaatatcgggataattgcgtccgaaaccatcataatccaatccgtagccaacgataaaatcattcgggatttccatcgctacgtattctatgttcagattgaccttcagcttttccggtttcaccagcaaagaggcgatatgaatcgcttcgggattgcgtgtgcccagtgtatccagcagacgctgcatcgtcagtccggtatctacaatatcttctacgatcactaccgtacgtccggcaatgtcttcattcagcccgatcacttctttaattactccggtggaagtcaccccctgataagatgccaacttcacgaatgaaatttcgcacggaatcgtaatatgcttcagcaagtcggcggtaaacatgaacgagccgttcaacacactgaggaagagcggattcttacctgccaaatcacgattgatttcgttcgctacgcgaatcacttctttttgaatatcctgttccttaatggaaacagtaaattgcttgtcttttatctgtatggtatccataaccggtcattttaaaaaagttgtcgcaaaaatacaattttttattctaccccgtgcatcatcttctgtaatttcttcgagagaaggaacagaatcagtgaggcaacaccggacataatgacgaacagcatgaagaagtcgtacatggtagcaatctgataaccaaggattgatttcacttttccgtcttcgggatagagaccgctcagcatacctgcaaatttatttgcggtggcggtagaaagataccaaatccccatcatcaaggaggcgaaacgtaacggactcaacttattaaccatagaaagcccgataggtgacagagcgatttctcccattgtatgaataaagtaaagtcctgtcagccagatcatgctcacctttactcccggaatagcatctttcactccaaaacagatgaagagataaccaagagaaagcagtaacagaccgattgcctgtttggtaggggaagccggttccatgtttcgcttattcagaaagctccatataccgggcataatataggcaaggatcactacaaaaagcggattgaatgactggaaccacgaagccggcatctcccagccgaaaatgctgcggtcagtctgttcggaagcgaataatgtcagagaagctcctgcctgctcgtaagctgcccagaagaaaatgacgaagaaagctacgatatagattacgaaaatacggctacgttctactttggtcaatgaaccatccagcagaatgagcactggaaagacaatacaagccgtaaagatacccacactaatccagtcatcgctaaaggcatagctaaaaaaagctattaaggcaactgtaagggcagtaatgatgatgatattacgtactttggtacgtttgtccatcttcggatgtgaaatatgttcggctttatcctcctttttttcacgtctggcgtcggggacgataccaatcggttcaccggaaggagagaaaaggtatttattcttctgagtttcaaagaggacaacagtgaacagcgtcatgattccggatgcgaggaatccccatttaaagtcctgcggattccctgtgtctcccaagaaaccgcaaatcaaaggagcagcaaaagaacctacattaacacccatatagaaaatggtgtatgcagcatccaaccgtttgtccccgggttcatataattgtccgacgagcgaagaaacggtaggcttaaagcaaccgttacctaaaatcatgaatccgagcccgccatacatcagccagtgggcaaggtctgtattgttcagtgaagaggcactcataaacatcaggaactgaccgactgccatcatcaccgctccccaaaataccgaacgacggatgccccaatatttatcggcaatgtatccgccgatcaacggagtcagatagaccagtccggtgtagctaccgtagatagaggccgccgcttctttatcaaaaagcaatgcctgcgtcagaaagaggataaagatagcacgcataccgtagtaactgaaacgttctgccgtgctcgttgcgaaaattaggtaaaggcctttcgggtgccctttcaatgaactcatgaattatgtgtttagtagtttatggggtgcaaaggtactaaaaagtagattaaatgcctcaaaaaagaagattcttatggaatagaaaaatacaggatggcgtgcaagaagtctcagttacccaccttattatgttttcaacagtgtaaataatcaagtggatattccccttaaatgtgggtcagtcgccatttatccaaaagtaaattcaacattctcaatactggcatagagcattccttctttttttctaagcaggattttattttcccttgccaaccagccgatagcaatcgctacatcctcgaacgtcaaacctaactcatggcacaaggtgaacatagactgttcgcccttttcatttaagatgcgccatactttcccggcatttgagccaattcttttctttttcatcatgcaaactttagaagattaaacaatttatatttataatctaaacattgtgagcacaggagaataacgtaaagcacattactgcactacaaagatatcatttttttcgaaaaaagcaaataatcaaggcattagctgtttatattgtaccatatctactgacagctttattccaaacgccgaagacactcataaaggaagcagttctatagcaggccggagaaggcgtaactatctctcaaagtatcggaagatcaaggagaaagcagtagaatagttacatcaaagcaccgatatcattaactgaccacggtcgtgacaagcattgttcacgaccgtgattagcattgctcacggtcgtggcgaggtcttgtcacggccgtgagcaactaaagaaaaaggcactttaagagaagaatgcctgcatcttagccgaaaagtctccgcatcttatctgaagaatgcccgtacctttgcagagaaatatccgccccccaactgaggaatcacagacagacaggacaaagccaccccaagataacttctgatttcccctgcatttttcaatttgccactttatctaaagccgaaaaccaaccggaataaaggattaattcagagtttttgtgtaagtttgtgcgtcgaaaactaaaagaatatcgcaatgaaaatatttccaagcagcagcattaagaagttagatgcctataccattgaacatgaaccgattgcatccatagatttaatggaacgtgccgcacaggcgctgactaaagccatcaccaacagatggaatccggaaacacctgtcaccatctttgccggaccgggcaataatggcggagacgccctcgccatcgcccgcatgatggcggaaaaaggatacaagatcgaagtatatctcttcaacacgaaaggcgaactttcgcccgactgtcagaccaacaaagaactggtagagatgatggaagaagtaactttccatgaaatcagcacccagttcgtaccgcccacactgacatcggagcatctcgtgatcgacggattattcggttccggactcaacaaaccattgagcggaggattcgctgccgttgtgaaatatatcaatgcctctcccgccatggtagtctccatcgacatcccttccggactgatgggagaagaaaatacattcaatgtaaaaagcaatattatccgtgcggacgtcactttcagcctgcaacttcctaaactggccttcctctttgccgaaaatacagaatttgttggcgaatgggagttattggacatccagctgagcgaagaaggaatcgaagagactgaaacaaactacgaaatgctggaaatcgaagaaatccgttcactgatcaaaccacgccaacaattcgcccataaaggaaacttcggacatgccctgctgatagccggctcaaaaggaatggcaggtgcatcggtactggccgcccgtgcctgtctgcgatcgggagtaggtctgctgacggtacacgcgccgttatgcaacaacgatattttgcaaacgtccgcccccgaagccatggtagaaacagatgtcagcgaaacatgctttgccgtacctaccgatacggacgattaccaagctgtcggcatcggtccgggactcggtcgcagcgaggaaacggaagccgccctgatagaacaactggaacattgtcagactccgacggtactggatgccgatgcactcaatattctggccaatcaccggcatacgctcacccatctgccgaaaggttccatcctcacccctcacccgaaagagctggaacgcctggtcggcaaatgtcaggactcatacgaacgactgatgaaagcctgcgaactggcgcacactgccaaagtacatatcattctgaagggagcttattccgccattatcacccccgaaggcaaatgttacttcaaccaggccggtaatcccggtatggcaacaggaggcagcggagatgtactgacaggagtaatccttgcactccttgcgcaaggctatcccgccgaagacgccgcaaagatcggtacttacattcacggattggccggagacatcgcccagaaaaaacagggcatgatcggattaatcgcaagtgatatcgtcacctgtctgccgacggcatggcgacttgtaagcgaataaaagttaagaacttacggtttattcaataacttcattaactttgtttttcaaaatcagctaaaaagaaccgaatatgaaaaagtttatcatagcaacaggactactaatggcaacttccgcctatgcgcagaccgaagtgctgacaggagtgacgcgaggaaaagactacggagtagtgtacgccctccccaaaacccagatagaaatagaaataaaagcaaacaaagtcaactataagccgggtgaattcagcaaatacgccgaccgctacctgagactgaccaacgtctctgccgaacccgaagaatactgggaactgaacagtgtcaaagtgaaacctgtaggtgtaccaaacagcgaagctacttatttcgtcaaactgaaagacaaaaccgtagctcctcttatggaactgactgaagagggtcttatcaaatcaatcaacgtcccctacagcagcaacaatgcaaagaatgcagcaaacaatgccgttgctccccaacgaaaagccaatccccgcgactttctcacagaagaaattctgatggcaagttcaaccgccaagatggccgaactggtagcaaaggaaatctataatatccgcgaaagtaaaaacgcattattgcgcggacaagcagataatatgccttcggacggcgcacagctcaaaatcatgctcgacaacctgaatcttcaggaagaagccatgaccgagatgttttcgggagtccgcaataaagaagaaaagacatttactgtccgcctcactccggataaggaattcgacaatgaggtagctttccgcttttcaaagaagctgggtatagttgccaacaacgatttggcaggcactccattctacatcagtctgaaagacctgaaaacggtgaagattccgcaagaggacggaaaaaagaagaaagagatggaaggcattgcttataacgtaccgggacaggcaatggtgacgctgacggacggcaaaaagaaattgtatgaaggagaaatacctgttactcagttcggtatcatagaataccttgctccggtattattcaacaagaactcgaccatcaaagtttactttgatccggtgaccggtggactactgaaagtagatagagaagaaagcaaataaaacctctaaaaaaacaaaacgatgggtggcgaaggacatatgctcgacatgatacgtcggctgaaagacggcaaagaagcctcccgcttacgccgtgaacggagaaatgacaagttagggcgacttagaagaaacaacgacccttatcttctgccggatacgactccggaagagatggaacgcatcatcaaggattcggaaaagaaaaaagaaaaagataacagctatttcgtatggggaacgctcatcattatgggcgtactgataggatgtgctgtcctcctgtgggcaatcttttttaatggataattatccatttaataaatccgtctttctgtaattgggaaagataggtagatacacgagactcgtagcctgcttcatattgaaagtggtctgcgagtttttctataatctcacgaaccgtccgctgcccgtctatcaggttccatacagccgtaccgtgttcttccagacgcacatgaatatctttggacattcctttcggcaataaataacgactcatccacgaacgtttaaaacgagggaaggagagcacaatagtctccccttcctgttcagctttaatatgttcgttacgacaagggatcacctccaggaggtttattttctctttcgtagccatatcttttctcttttatatcttttcagatagaatatatactgtgattatttctgaatatttgcttcttccagtccgtagcctttcttcttgttttccactttcagcatcaaggcaacaatcagggcaagtacaccgaacatagcaaaaatagccatcggcaaagtataatcataagtctgtgcaccatctacaaccggacctttgcaataagaattcaacacccatccgatcagcaaaggcacgcccatcaatccccagttctgtacccaaaagatcaacgcataagccgttcccaactgtttctccggaataatcttcggaaccgaaggccacattgccgaaggaaccaatgagaaagcaaatcccagaataatcatgatcaccgttgcaaaccaccatatattcagaataggaagagcgaacatcgtgtgtacgaaaatcagcatcaccgacccgatcaccatcagcgtggctcccttaccgatacggtcatataatgaaccgaacaacggtgtcaggatgatcgcgccaatcggcagcaatccgggaatcgttcccgcaagtttcggatcaacattgtacttctgtaccatcaaatcggccgcatacttgatgaaggggaatacagccgaatagaacaatacgcacagtaatgcgatcagccagaatcctttgttggtaatgatatagacaatgtctttcatgcggaaaggttcttccggttccagtccttccgcatccagtgaagcatccagtttcttatcgtagaaagtatagatgaagaatgcgatggtacctacgcacaacatgacgagacagaacagaataggagcgggaatattggtatggaatacgccgctctcatccgtagacccgaagaagtctgccaaaggaacggtaagcaccatggccaaagtcgttccaatacgcgcggtcgccatttccagtcccatagcgagagccatctctttgcctttaaaccacttcacgataatcttcgaaacggtgatacccgcaatttcgactcctacaccgaaaatagcataacccaatgcagccaatgtgacttgcatcttgaatccgaaaagcatcgcaccttccgggaaagtagtagtaatagcataatatttcaatccacaaccgaacaccatcaataaacaggcacccattccggtgaagcgtactcccatcttatccagaatgataccaccaaagatgagcatcagcaggaatacattaaaccagccataagcactggtgaaaaaaccgtaatctaaactgtcccagagaagttctttttcaagcatgggtttcagaggagacataacgtctgtgaggaagtagccgcacaacatggtaaaagcgactaatgctagaacactccaacgcagcactgcggagtcattcagcttttgtttcaattgttctgtcattgtaatatttaaaaggagttaataatctcgtaacgggcaacaaagttaactaattatcatttgttttactaaaaaaggagaacattttataagaaaaaggacatctgaccggatattcctgtatgaagaagagcagaccgggcccaataataaagacaggcgcgaactacacgtattacacgattctattagaatctcttgtaattcgcgtaattcgcgcctataatgaagagaacgggtcaaaaagcccgttcactcaataagtttaaaccgaatatcctgtcactgaattattctgctgcaggagcaggagtttcagtagccgaagcttccgttgctggtgcagactctgcaggagcagtagcatctgtctgaggagcagcagtaccggtaggcatattatacgggttggtttgttgttctttctgtgcttgttccaacaatacatctttagccgcagaagaagaaggaacaacgtaagcagtagcaacgctcatcacaaccatgaagatagccagaccccaagttgctttttccagaaaatctgtagtcttgcgcacgcccatgatagcgtttgatgaagaaaaaccagaagcaagtccgcctccttttgaattctgaatcagcacgatgaagcacatcagcaaggctgcaatcaccattaagataatgaataataagtacatttttagttattttgaattagcgttaataatcaatttctccaaaaatctgatttggtctgcaaagtaagcatttttttttggatatttcaagcttaattttttaattatttcaagagctttcgaatatcgttgctgttttacgtagattttggccaaagtttctgtgaaacagctgtcatcttcctcttctatggtgttggtttcagttgtttcgtctgttctgcccgtttcgtttgtttcagcggaagaagctgcctttgctttctcttcttccctcaaaggtttcaggtatacgactggatcagtctcgcttttttcgataaagttgtcaatcagctcgtgtcctttcagcttgggcattgcctctgccggctcgtcggcgacaggtgtctcttcgagaaggtatgccgtatagtccatagagtaatcaaagcttgtctgactggttacttcttcgggagccgtcgaaaggaaagcatcgatcagagccagtgtccggtcgacggtaggctcatctttcaatacttcagagagaggcaaccctttcttctgggattcgacagcgaagcgttcgccttcgatcagatgaaacagtttccgtcggtcggcaatatacagaacggctttccgcagttccgcaccgaaattaatgtcgtggagaatatacaggttcttgagatacaacaaccggagcgactgaaaatacggatacctcgcgagctggttgcgcagttcgtacaaagtatccctattcagcgtctcgggatgctgaatccattgttgcaagttaacagaagtcattaaattaccagtttgctacagttgcattaaatatttggtcggttatctctttactcatttccgctattaatccatcctgtacggctgtcagcagctggctggaatcataggtacggaaagctgagaattgttgttcgaagtcttcggcgtgatttgtgttgttgacaaagcgtacattgaccgtgatggtcagcttcgtttccgaagagtaaccatcggcagacactgcctggttatactggttgtagcccgtaatttcaccgtcaatctgcagatccgcattctggttcggtttcagcagttgcagacgggtctgtctgatgaagatatctttcaggtcttcattgaacttggtagccagcggagcatacacatactccgacttaatcgggaaatcagcaatcgaaatagtcttcaccttatcgtaattgatagaggagccattaaacttataggacacactacaggcgatgatgactgccggtaaaacaaccaatatcagcggtcgtgctattttcttaatccaattcatattcttttatttttctgtaaagggtacgctcggagatattcagatccttcgccgcacttttccgcttaccatgatgcctctcaagcgctttacgtatcatttctttttccacttcatcgagcgaaagggtttcttccacatactcttccgtgtcctgaatatcgtcatcgtcttctttgggacaaacagacggttgctgcacagcatggattatggccggcacggaaggttggtgcgtcgttgtcactaccggagtagctactacctgtcccatctgtccgacttgtcccgcacgttcggccatcatattgtgcaccatcttcttcagttccgccacttcctggcgcatatcgaacaagacagaatatagtatttcgcgttcgctctcaaagctcttgctctcgcgtgtgccgaacagtgccggaaggcgttgggtattctgtgccggaagataggtctgcagaatcgcagccgttatctcacggtttgtttctataatcgaaatctgctctgtgatgttcttcaactgccggacgtttcccggccacggataagcaagcaatatcttcttggcatcttccgtcagctggatagccggcatccggtacttttcggcaaagtctgcggcaaacttacggaacagcaacagcacatcgtctccgcgctcacgcaaaggtggtatctgaataggcaccgtgttcaaccgataatacaaatcttcccgaaagcgtccttcggcaatggcttgtgtcaggttcacgttggtagctgccacaatacgtacatccgtcttttgcactttggatgaaccgaccttgataaattcaccgctttcaagtacacggagcagacgcgcctgtgtaggcaacggcaactctcccacttcatcaaggaagatggttccaccgtcagcttctccaaaatatcctttccgctcaccaatagcaccggtaaatgctcctttctcgtgtccgaacagttcggaatcgatcgtaccttccggtatggcaccacagttgacagcaatatactgcccatgctttctccggctatattgatgaatgatctgtggaaaactttcttttccgacaccactttctccggtaatcagcacagacaaatcggtaggcgctacctgaatggcaacatctatggcacgtgataaagcctcggtattgccaataataccgaaacgctgtttcacttgttgtatctccgctttggtcatctatcttaatattaagtaataggtaataagtattaagtaataagtattaagtattaccatcatgatcatctcgcttccatccgcatggctaatacttaatacttattacttaatacctattacttaatcttcgtctactgtatccagttttagtttatcactatcgtcccgtttctcgtaatactgcttccgcaacgggtttatccgtgccgctttctcgcgctggcggttgcggaatacatcaatcgctacataaatagcctggcggaaagagtcttcgctggccagtcctttaccagcgatgtcataggctgttccatgagccggagaggtacgtacaaccggcagtccggcggtatagttcacaccgtcttccatagccagggctttgaacggagccagtccctgatcatgatacatagcaaggattccgtcaaagtgagtataattgcccgaacccataaaaccgtccgcagcataaggaccgtaacagatgatccctttctcttccatttctttcatggcagggataataatttcctgttcttccatacccagcagtccgccgtctcctgcatgaggattcagtgaaagcactgcaatacggggcgcaccgataccgaaatcctgtttcaggcaacgatggaaaatcatcagcttttcctgaatcagttccttggtgattgttgtagcaatctcccttaccggaatatgcgtcgttactaaagccacacgaaaatcgtttttcatcaggatcatcagtgacttgtttccatcgcccagacgttcttcaatatactccgtatgaccgggaaaagagaactcttccgactgaatggtatgtttgttgatcggagctgtcacaatgacgtcgatcagtccctcacgatactcttctatggcacgttccaaagcacccaatgcagccttacctgcttcgggatcgggtttggagaattccactttcacttcgtcatccgtacagttcactacactcagacggttgtatccggcttcggaagcagtgttgacaatgctgaaattagcctgtacatccagtgctttacgatggtaagccgctactttaggtgaaccgtagataatcggagtacatagctcaagcatggtagggtctgagaatgtcttcaagatcacttcataacctaccccgttgatatctccttgggtaatgccgattcttattttgttttcttccatgtttttatttattagttggttccgcttctttggttacccccagtggaatctgactctgctgaccttcttgcagaagtttcagcgtataaagagatgcttccatctggcgaaccagattgcgtttcattttatcgggtgaatatacaaatatttctgctgtaataatacgttggttcttctgatccagacgagtatgggaaacgaacgggccacccatgaagtcacccttcatgcgccacaatccacgagcttccatcgtgtagtcattgtgcacgttgatcggacgaacatcggtcagtaacgagtctgtcgacatatatacgccttctttatacccggggatattggctttcatcacggaatcgcgcttatgaacaaagtactctttggtgaatgtatccttgtcagtataaggataagaatacatcacgaaattgcgatccgcgctgcctgtattggtagatgcccagaagaagtcctctcctgtcttggagttattcagttcggaaggtatccagatatcgcagccaaacagactatctaccttatttgagataaagttgttgtgcttttcctccagcaaagtaatctgacggttcatttcagcgcgagtgaagaagtcgataatcgtctgtttgttttcttccacaaacttctcaaacacttcttcgttcggagcctgaatggtcaatatcatctgtggagaagcataaacgtctttcgcatacttgaaagtacctttggtataaatatcttttatgtctactatcacaatattacggatcaacttcagcgtagaatcatagtccttcggtgaagtatacataatccggaaagaaggttccgactggggcagtcccggcatgtcagaatcaagcacatcatgcaaggcccttccggcggcacggtcccacactcccgcatctactacaaccagcagttcatacggacgaccactagaggtatgattcccctttaatccacaagaagcaactacgaaggctaccagagccatgcttaaataaaaaaagtactttttcatgatgttcgatttttatattaacttttattattttcctcctgtttcgcagtcgacagcataccgcatgccgcaaaaatatcctctccccgcgaagcacgaatggtagtgaaaagcccgtgcgtggtcagatagtcacggaaacgggtcatcgtatccatatcggctccttcaagggctactcccggaatagaatggaaacggatcaggttaatccggcaatccagtccgcgaagcagtttgagtaactccttggcataaacttgcgaatcattaagccccttaaaaacaatatactcaaacgaaagtcgacgctgtttgctaaaatcatagttttttaacagttccaccatttccgtgatagaaaaggctttctccgccggcatcagttccacacgctgggcggtcaccggagaatgcaggctaatggcaaggtgacagtcgctttcttcgataaagcgccgcaatcctttccgcaatccgacagttgaaacggtaatccgcttcggactccatgcataaccataggacccagtcagtatgtccaatgccttcaacacctcttccagattatcgagcggttcgcccattcccatcatgacgacattcgtcagtttgtcccgttcgggcaaggagtgaatctggttgataatctgatgggcggtcaggttggcagagtagccttgtttcccggtcatacagaacttgcagttcattttgcagcctacctgcgaagagatgcataaagtcgcccgttcatcatccggaatatacaccgactccacaaaatgattctcgcccacagggtacaggtatttcaccgtaccgtctacagagcgcatttcctccaccggagcttcagctcctacctcatagttctgcttcagtaactcccggtatttcaacgacaagttagtcatttcatcaatcgaagtcaccttcttatcataaagccaggatgcaatctgtttggctgcaaagcccggcattcccagacgtttcaccagtgactgcagctctataagcgtcattcctaagaggggatatttagacatcattctttctgttcatggtttatatttgcaaatgtaaggaaataaagtcgatttccgtatagcaaggatgtaaaagttagcaaaaaaggtcgttccaaagtatggaacgaccttttgcagttatcgtttttacgactaatcttagaagaacaggtaacgtgtatccttcacttttcctttcagatacaggtcgttcatcagacggcttgcgaagcgtgcgtgcatgttagccaatgtagcttcttcatctttagcgttgaaagtatcgctcagtttgtctttgccatacatctgaagcacaaatacaccggcattacctttgatcggagcgctcagtttgttcatttcagccacagaagcataagcacctaccaacggttcgctgctgcgcaatgcagaaacataagcgggagcggcaaatgtaaccagcttcaaagaatcgctgactgcgccggacatagccttgtactggtcgagagaagttgcattggcagccttcatatcagccatgatcttttcggctttcttatctttaacgatttcagctctcaactgatcctgtacagctttcagcggacgatatccttccggagtaacaccaaccagagctactgcaaccatatggtcgctttcgccacattcatacaaaccggaaacatcacccggtttagcggcaaatgcccatctcaatgcttctttagtacctcttacaccaccgatagtatgttctgagctatacaagtctcttctgtcaagcagtttgtatccggcttcttcagcgttggcgatcatcttttctgcagtaggattggcagcgatgaactggctgaaatcattgtaagcacggttataagtttctttgctgaattcaacttcacgtttcacaacagctactttatatttatccttcacagctttcttgttagtcacttgcaggattacattagcttgtcccaacggcagatttactacttcgttcacgcctgtattattgatagcagagataaacttcaggttgtcaccatcgatctgtgcgccttcatactgtgcagagctcatccagttagtctcacccgtttgaccgtatttcttagccagatctgcgaagttagcaccgcctttgatagcagtatagatactgtccgccaaggcttttgtcttcaaagcgtcttctgcaaacacctgaatctgacggaactcgattgagtcggcagcagctgtttttgcaaccactttgaatgaattgatagtattgtcggcaccattatagtacggaccataaacagaaccaacggatgcagagtccagacgggcaactacatctgacgggaaagctgttttattatagaacaagtctacataaggagcttccgagcctacagaacggataaaagaagtatagtcatctgttgtagtagccagctgtgcagtagcttcgtctacttcctgctggatagcagctctgtcttccgcacttgcagtcacctgaacatcaatgtacttgatatcacggctttcctgatattgcttgaactgttcttttttcttgttataaaggtctttcagttccgattctttcacaacgattgtagaatctactatagaagaataaggaacggcagccatcaacaagtcatattgattcactcttgcgtcgaaagcatcctgtgcttctaccgggttagagagaagcgcttttgctaccaatgcctgatatttttctgccaggcggctctgcaccaatgtcttctggatgaatgaccagtatttgtacatgttgttgtactgttctgcatactgagccggcatctgagattcgttcattttagcgtaatctaccaggaacttattgagcatatccttatcgaaagcaccggtctgcgggttacggaaaggagtctgttgcaacaacggatgcacgcctgctttcaggatatcctgaatttcagcagcagaaactgtcagtcccaatgcttttgcttctttctcaaccagcttgttattaacgtaggaacgccatacttcgtcgcgcacctgattgctctgttcgtcgttcaatgcagtcactccgcgagaaagctttatcacttcggtatattcttctaccagattctgatactcttgagcggaaagagcatctccgttcacctcacctacgtcatgtgcctggtgcggttgcatcaccttccacgcgtcacccgcgatgaaagcaaacagcgccaaaccgataacaatcaccaatagaggtcctttcgacctaatgttttgtaatgttgccattttgattaatacgatttatgtttattattatttctttctattgtcattttagcgcacgaagatacaaaaaatgctaatatgcttctatttattagctaaaaatttcacggttatcgccattattccatgacttttaagcgtacaagttctatttttgtcgctgtcaccttgattattttaaactgataacggccgacacgtaccaattcgtgcagtttcgggaagctctgatattggttcagtatcaatccgcctactgtcagatagtcgtccgattcgggcagatcaagtccgaacatttcattgactttttctatctccagacgagccgacaaaacatattcatcttcgtcaatcttcttgcagatataggaagtattgtcatgttcatcttctatatcaccaaatatttcttctaccaagtcttccaacgacacaatgccggatgtacctccaaactcatccactaccacggcaatcgtcctcttttgcaacataaacagcttcatcagtttgtgggcagacatcgtttcgggtacgatcggcacgtctttcacgttatcgcgccagtctttcggatcacgaaacatttccgatgaatggataaaaccgaccacattatcgatatttccgtcatacacaatgatcttcgagatcccggattctataaaacggctcttgagttcatccaacgaagtagtaaggtcgaccgcaacgacttcggtacgtggaacgatacagtcacgtatttttatgtttgagaaatcaagtgcattttgaaagattttcacttccgtatccaattcttcttcattcgcagcattatcgatgctactctgcacgaaatagtccagatcgacttttccgaaagccttgtccgaagcatctttgttaaccttcataccgaatatacgaagaaaaaggcaagacaaaccggaagataacttcgagacaggatataaaatgacataacaaataaaaagcggaatagcggcaacattcaagaccagattgggattgatcttaaacaatgttttaggaagaaactctccagtcaccaaaataatcagagtagagatgacggtctgcgccaacaccatcagaaagtggttatcaataaaaccagccaacagattatcaccgatgatctgtgccatcaatataccatagataaccaatgctatattgtttcctaccagcatggtagagataaattcgttcgagttcctgaaaaagatggaaagaatacgggatgtgattcctcccttacgttccatttcaaagcgcaacttatctactgagacaaacgcgatctccattcctgagaagaaagcggagaaagccatagtgatgagtaaagagatataaatattcatagtttatttcacagaatcttttttcgtcgaatccggcggcaatgcttttacttccggttgagcagttcccccattttcgtcaacatagaaaatgccctcaatattctgaatgacataaacggtcatatcttgatttgactcaaaaccatgcccggtaatgactcggtccggctgttggatacgtataaatttatcagaataaactttcttggttgcttggttccaaaagagcaactcggtattaaaacgttctcctttccggttctgtatatcaacattccctattagcttccaaagttgttgtttatcataaaagtaggcagtatctgctttgatgctggcttcaatattaaagattgagtcgaactgttccaaataaactcctttttcaaaagcccaataagaaggcttcttacgatcgaacatcaaccattcttccgtcttcacccgataacgtgtcactcccgaatcagaaataagggttgtaactcccaacgttttcatcattggtaatgagtcacgctcagtaatagcatcacctacagtcttcttcttaccgccgcaggaagaaaatgaaagaagcataacaattgccccgaaggcaattgttatgcttatgcttttatgcaacaaacggttacttcgttttcgcaacataaattttatctaatcgttgtagtctctccgatccagccaccgatagtgatacggtcgccttgtttgtaacctaacataaataggtctttagcctgtggagtatgaccggaatatgtaccaatcaacttgtttgcttcttcagccacacttgggtcaacagcttttgcacgttgcagtttatcaattacagcgaagtaagtacacttattcaatgcagactcgtcactccagttaggactcattgcatacaagttagcaatcagaatataaggagcaccatagttctcgttgaagctaattgctttctgacagtatgatctggcttgagacaatttcttagcagaagccaatacagctgcagcagcatatgccttttctgctttcttcacgttgtcagtttccagttggattgcttcgtcaaagaacttcacagcaccatcaatatcacctttcttgaatgcctgataagcacatcctgtagcagcttcagctgttggctctatcttataagcgtagaaagatgcttgcaaataagcttcgctttctgtacatctcatcattttcatgatatcgattacttttttcagataagccaagtctgtctggttagcttctactttcggcccatagatactttgcagagattcgcagtcagcagtaccactgtttacgaacaaagccacgaggttatctttgatacccataaagtttttcttttttgcttcattagtttctgcagcaatagcagcgtcagcatattctgaagcaagcagataatcctgaataaattgttctttatgattaggatcagctttcagtttatccaatgacatctgaaggaaataaaaaagcgtagcagctgccgattcgcctttcactgcatttacagactggctcaaccattgataggcttggttagcgtctactttcggagccaaagcaatatagtctacagccttgatacccagtgcttcgtcagcagaagacactttagttccttttgcaaggaattcttctgtgtatttcatacgcaaatcatgcgtattcatcaattcatcaaaatacttctgatattcaggattattcttatccttaatctgagccatcaagcctttaaggattttatatccgtcagtaaaagtgtaaaaacggagtgtgggacaattttccaacacagctttccagggagtatacgcatctttaaaatttcctgcacgcacagcctcatgcgaaatactactgtttgagttacagttagacgcatcctgtgccaccacagtggttgctccagccgaaaggaacaacatagccacaagcgttttaattttcattgtatctaaattttagttgtttatataatatcgtctattctctctctcacttttattactctaccctacgcttgaagaaccaacgttcgttgaacgtaagcccgatactcacgcggaagatattttcattcaccatgttcgtctccaatccttttacacggacaaactgtccactgatactaagtatggaacgcgaacggggaacaggcagaccgaaaccggcagttacaccatattcacgtgaagcctttttcccatcaatcttataatacggtgtcgtataataagctcctaaacggtattttatgtgggcgaaataggaacgtcctatcaaattaggaatgtattccgcacctactgatattttcgtacgatcacaataagtgaaagtttcattaaagtcctgacgtacatcttcgtcagtcgttgctacaccaaaattagtttttgaccattgctgcttactataatctgcaccaatcgtcaaacgcttgtcatagttatatgttaccccgactccaaaggtattaggcaactcaaatgtagcgtcctgtgcattcttatattcagttccataattcgtgttggctcccatgattacaattgacgtataatcattattcaacttatgtttaggagaatatacagcaccaatcgtcaaagaactctttttattcaaagcctgtgtatactgtgcaccgaaatccaatttataatcagaaatcgaggttaccatttttcgctgataggaatcataagaagatgttcccggatagaacattcctcttgtacgggttatatctccccaaaaataagatgcattcacaccgacggaaagatttttaagcacttttacaccagcacctacgtacaattgatgtaagcctccatttcccgtaaaacttcgactatatgtcaagtcattgtccgtagtctgactatcagacaccgtataccccacattagaatatggcaacaatccgacactcatcgccatccacggagccaaccggaactgcatagcgagataatcgaaactggcgtttttggcattcaacttcaggccaccaccactaatattcatattctgtaaactgacacccccttcgaacaggaacgtcaacgaatcaatggccgtataggaagcaggattcgttggattgatctgtgctccatccctgagtccgaaagcaattccacccatcgccttgctatttccgaaactttgatcggacaagtcgccatagccatatcgtgtgtaaggagagtttgtattattttgagcgattgccgttccggtaaccatcatgagcaaaagcgcccaaatcgtgtgtttaaatcctaccattattatagtttaaaattctatttaatcctttcaacactaaaaatctatctgcaaagatggcactttttacgctgctatcaaaagaaaagtcatctccgcccgttaaaaaaaccaaaagttcaggatatttatgcttcatagcctcaatataacctgaaatttcatattccattcctttcagcacccctgcacggatggcagtttccgtatcccttcccatcggcagtttgcgcccgttggagtctatcagcggcaagcgtccggtaaactggtgaagcgctttatagcgcatctgcatgccgggagaaatattaccgccatgatattgtcctttcgagtctataaactcataagtgatgcaagtgcccgcatcaatgaccaagatgtcattatgaggaaactgctcgttggcccccactacggcagctatccggtcgtatcccaatgtctcgggagtttcgtacagattacctaccggcagcggagtctcatgattgagccataacagagggaacggcaaagcagccagttcggcaagtatccgttcgttcaaatcgacgacagtagctacaatcccccgctcaatccggtatttggagcaaagagcctccaagctatccaatgattgattggattcggtcaacacctccaccatctcacttccattgaagagggcaactttcgctgtcgtatttcctatgtcgataattaagttcaatacttttcgtctttagcggcgcaaaggtaaagtaaaaaaagaaaagttgaagcatacagaaggaattatcttcttttttcatttcaaagactcaccaaaaaaagaaaaatcgaactatatatttttaaatatattgttttattagttattctttattatggttccgcactgcgtttcacgaacatttttcacaacacaataaacaactatagatcaaccaattacaaacaacttagagtgttccgctatgcgtttcactttcttgtaatgaaaattcctccaaacagaggctctatttaccctaatcagagcctctgattgggtgaaatagagcctctgttctgataaaacggagcctctgtttctacaatccaactattcttcgtatattcgccaccaaaataataaacgggcatttctgatgaaacggacaattctatatccattactgactctttatctgcttatcttttcaaacggacaagccatagcttctgacaacgactccatccgcctcagtctgctgacttgcgcacccggtgaagaaatctactccctgttcggacatacagccatccgctacgaagatccggtcaacggaatagatgccgtattcaactatggactattcagcttcaatactcccaacttcatcctccgtttttcactcggtgagacagactaccagctgggagctaccgactacgcccatttcgcggcggaatatgccttcgacgggcgcagcgtctggcaacagacactcaacctgagcaaagaagaaaaagcggaactcatccgactgctacagaaaaactatcttcccgaaaacagagtttaccggtataatttcttttatgacaactgcgctacacgcccgcgcgataaaatagaggaaagcattgacggaaaggtaatatatcccgcagagccgcaagacggttcgctatctttccgcgatatcgtacatcaatactgcaaaggccatccgtgggcccgcttcggcatcgacctctgtatcggcagcgaagcagaccgccccatcacgcaacgccaaatgatgtttgcccccttttacctgatggatgctttcgcaggcgcccaaatcgtccatgattcggttcagcgtccgctcgtatccggcaaggagctgatcgtagacgcccttcccgaggaagaagaaggcggttggatgcccaccccgttccaatgttccctcctgctttttatacttaccgctgctgctactatctacagcatccgcaaaaggacaggactctggggtgtcgaccttattttattcggtgccgcaggcatcgtgggctgtgtgctggccttcctcgccctattctccgaacatccggctgtcagttccaatttcttattgctggtattccatccgggacagcttctgctccttccatacatcatttattgtgtccgaaaaggaaagaaatgctggtatttgacgctgaatttggtcgttttaacactttttatggtgctttttccgctaattccgcagagatttgacttagctgttgtacctttggcactctgtttgctgatacgttcagcgagcaatttgatattgacctctaaaaagaaataatgaaaggactactaacttccctgattaccgtactgaccttcaccgggctacaagctcagtcgttgcctactgcccctaaacttgtggtaggactcacgattgaccagttgcgtacggactatctggaagctttttcgtcgctctacggcgagagaggcttcaaacgcctctggaaagagggaagagtattccacaatgcagaatatacattcagcggtgtagaccgtgcctctgccatggcagccatctacagcggatcgacaccttccgtcaacgggatcatttccaaccgatggatggatgtagccaccctacgccctgtcaacagtacggacgatgcggccttcatgggttattacaccgatcagacctgtgcccctaccaaattattaacctctaccattgccgacgaactgaaaatagcgacacaaggcaaaggtatcgtatacgccatcgcccctttctgcgacgcagccattttcgctgccggacatgcaggaaacggagcgttctggatcaatcccacgaccggaaaatggagcggaacgacctattatggcgaattcccctggtgggcaagccaatataacgaccgtcaggccatcgactcccgcatctccagcgtcacatgggaaccggttttcccacgtggtatgtacactttcctgccagattggcgggacgtagtgttcaaatataaatttgacgacgaccgcaacaataagttccgccgtttcatcaccagcccgttcgtcaacgatgaagtaaatgccctcgcagaagaagcaatcggcaaaggttcggtcggcatggatgacattactgacttattggcacttacttattatgcaggcaactatgcgcacaagtccgtacaagagtgtgccatggaaatacaggacacttatgtacgcctcgaccgcagcatcgccaacctgcttgacctgctcgacaagaaagtaggcttgcagaatgtgcttatcttcgtcacttccaccggatatacggacagcgaatcgacggattcgggactgtacaaaataccgaccggagagtttcacctcaaccgctgcaccgccttgctgaacatgtttctgatggccacttacggtgaaggaaaatatgtagaagcctatcacgaccagcaaatctatctgaaccacaagttactggaacaaaagcaactgaacctgacagaagtgcaggaaaagtctgccgacttcctgatgcagttcagcggagtaaatgaggcatattccgcccaccgacttctcctgggttcatggactccggaaatatacagaatacgcaacggctatcaccgcaagcgttccggcgacctcgtgatcgacgtgttgccgggatggactatcgtcagcgaaaacggcaacgagaacaaggtggtacgtcattcctatatccccgcaccgctgatcttcatgggtcactccgtgaaaccggccatcattcagacacctgtaacaatcgaccatattgcgcctacactggctcatttcatgcgcatacgggctcccaatgcttcttcttcggctcctattaccgatcttcggtaaaagattcctcacaaaaaccatgcgaaaaacataaataaatcagcattttaatgtaactttgcgcggatttatatatggaaaaagcaccgtgcagacaatcaagaaataataataaactaaataatacaacatgggatttaatgaatttttaagctcgattttcggaaacaaatccacacgagacatgaaagaaatcaaaccctgggtagaaaagatcaaagctgcctacccggagattgaagcactggacaacgatgccctccgtgccaaaacggaagaactcaaaaaatacatccgcgaatcggctactgacgaacgcgctaaagtggaagaacttaaagcgagcatcgaaagcaccgaactggaagaccgcgaagaagtctttgcacaaatagataagatagagaaagaaattctcgaaaaatacgagaaagcactggaagaagtattgcccgtagctttctctatcgtcaaagcaactgccaaacgatttacggaaaacgaagaaatcgtagtaaccgcgactgaattcgaccgccatctggctgccaccaaagactttgtacgcattgaaggcgacaaggccatctaccagaaccactggaatgccggcggcaatgatacggtatggaacatgattcattacgacgttcagctgttcggtggtgtcgttctgcacaaaggtaagattgcggaaatggcaaccggtgaaggtaaaactctcgttgctacccttccggtattcctgaacgcgctgaccggaaacggtgtgcatgtagtaaccgtgaacgactaccttgccaaacgtgactccgaatggatgggcccgctttatatgttccacggtttgagcgtagattgcatcgaccgccatcagccgaactccgacgcccgtcgtcaggcataccttgccgacatcacgttcggtaccaacaatgaattcggtttcgactacctgcgtgacaacatggctatcagcccgaaagaccttgttcaacgccagcacaactacgccatcgtcgatgaggttgactcggtattgattgacgatgcccgtactccgctgattatttccggtccggtgccgaagggcgacgaccaactgttcgaacagctccgtccgctggtagaacgtctggtagaagctcaaaaagtattggcaaccaaatacctttccgaagccaaacgactgattgcctccaacgacaagaaggaagtggaagaaggattccttgccctttatcgtagccacaagtgtcttccgaagaataaggcattgatcaagttcctcagtgaacagggtatcaaagccggcatgctgaagaccgaagaaatctacatggagcagaacaacaagcgtatgcacgaagtgaccgaaccgttgtatttcgtcatcgaagaaaaactgaacagcgtagacctcacagataaaggtatcgacctgatcaccggtaactccgaagacccgacattgttcgtgctgccggatatcgccgcacaactttccgaactggaaaatcaaaacctgaccaacgaacaactgctggaaaagaaagatgagctgctgactaactacgccatcaaatcggaacgcgtacacaccatcaaccagttgctgaaggcttacaccatgttcgagaaagatgacgaatatgttgtgatcgacggacaggtgaagattgtagacgagcagaccggacgtatcatggaaggccgccgctactctgacggattgcaccaggctatcgaagcgaaagaacgtgtgaaagtagaagccgccacacagaccttcgcaacgatcactttgcagaactacttccgtatgtatcacaagctgtccggtatgaccggtactgccgaaacggaagcaggcgaactttgggacatctacaaattggatgtagtcgttatcccgactaaccgcccgatcgcaaggaaggatatgaacgaccgcgtttacaaaaccaaacgcgaaaagtataaagccgttatcgaagaaatcgaaaaactagtgcaggcaggacgtccggtactggtaggtacgacttcggtagaaatctccgaaatgctgagcaaaatgcttaccatgcgtaagatcgaacacagcgtactgaatgcgaagttgcaccagaaagaagctgaaattgttgcaaaagccggtttcagttgtgcagtgaccatcgctaccaacatggcaggtcgtggtaccgacatcaagctgagcccggaagtaaaagccgcaggcggtttggccatcatcggtacggaacgtcacgaatcccgtcgtgtagaccgccagttgcgtggtcgtgcaggacgtcagggtgacccgggttcttctgtattcttcgtgtcactggaagatgacttgatgcgtctgttctcttccgaccgtattgccagtgtaatggacaaactcggtttccaggaaggcgaaatgatcgagcacaagatgatctccaactctatcgagcgtgcacagaagaaggtggaagaaaacaacttcggtatccgtaaacgtctgttggaatatgacgacgtgatgaacaagcaacgtaccgttgtttacaccaaacgccgccacgccctgatgggtgaacgtatcggtatggatatcgttaatatgatctgggaccgttgcgcgaatgcgatcgagaacaatgactacgaaggctgtcagatggaactgcttcagacattggctatggaaactccgttcaccgaagaagaattccgtaatgagaagaaggatacgttggcagaaaagacattcaacattgccatggaaaacttcaaacgcaaaacggaacgcctggcacaaatcgctaatccggtcatcaaacaggtatacgaaaaccaaggacatatgtacgaaaacattctgatccctatcacagacggaaaacgaatgtacaatatctcttgtaatctgaaagccgcttacgagtccgaatcaaaagaggtggtaaaagcattcgaaaagtctatcctgctgcacgttatcgacgaagcatggaaagaaaacctgcgtgaactggatgagttgaaacactctgtacagaatgcaagttacgaacagaaagacccgctgttgatctacaaactggaatccgtaacactgtttgacgctatggtgaacaagatcaataaccagactatctctatcctgatgcgcggacagatccctgtacaggaagctccggcagacgaacaacagccacgccgtgtagaagtacgccaggctgctcccgagcaacgtcaggatatgagcaagtatcgcgaacagaaacaagacctcagtgatccgaaccagcaggctgctgccagtcaggatactcgcgagcaacaaaaacgcgaaccgatccgtgcggaaaagacggtagggcgtaatgatccttgcccatgcggaagcggtaagaaatataaaaactgccacggacagaatgcttaacagcagtccgatgtaagattataatctaaaagaaagcctcaaacggttaaaaactgtttgaggctttcttttattcatccaaaatagtacttttgcttaaactactaaagatatcaagactatggcaaaattctattcactggcatttgtttctctgctactgttggcactcggcagctgtcagagcctggagcagatttctattgactatatgcagcccggagatatgactttcccttctcaactccgtaaagtggctatcgtgaataacaccagcaccgaaccggataacaagctgatcacacagaccgaaaagccgaaagaaaacgtacccgaaataagccacgccacagcgtatgccaatggtaacgttaagattgcggctgaatcgctggcggaagaaatcgcgcatcagaactatttcgatgtagtggtgatctgtgattccgctttacgggccaatgacaagtttcctcgtgaaagtacactgagtcaggaggaagtccaacagctgacatcagacttgggagtggactgtatcatcgccatggaaaacctgcaattcaaagcgaccaaaacggttcgttatatccgtgattttaactgctacctggggacagtggatgtaaaagcctacccgacggtgaaagtatacctgccctcacgcagcaaaccgatgactacgctacaccccaccgacagtatcttttgggaagaatacggaggatcggtaacagaaacatttgcacacatgatacctgatgcacagatgctacgggaagcttctgaatttgcagggactatccctgtcaaacagctactccctttctggaaaacaggcaaacgatacttgtacaccggtggctccgtacagatgcgtgacgcggcaatctttgtccgtgaaaattcatgggacagagctttcgaactttgggaacaagtgtacaacggaaccaagaaggaaaagaaaaagatgaaagctgccctcaatatcgctgtttattatgagatgaaagacagcttggcaaaagcagaagaatgggcagtcaaagcacagcaacttgcccaaaaagtagataagaaaaacattcccgaaaatgcggcgtacgccaccattgacgatgtaccgaattactaccttacaaccctttatgcaaatgaattaaaggagcgtaacagtcaattgcccaagctaaaaatgcaaatggagcgatttaatgatgatttttaaggaaatcatgcattgattattattttttttatacctttgaggtaacaaaaaggaagaacctatgaaactgagccaacaatctctgtctaccatcgaatcggctatccaaaaggcagccggcaaatatgtatgtggctgcgaccagacagccgtaaccgatattcatttacaaccggaccaaacatcgggacaactcactatttataacgacgatgacgaggaattggctaatgtaatgattgaagagtgggcgacttacgatggagatgatttcatggaaaatgtagagcccaacctgaaaagtatcctttgcagaatgaaagatgcaggcgacttcgataaagtaacaatattaaagccttattcattcgtactggtagatgaagataaggaaacagttgcagagctgttgctgatagacgatgatacgttgctcgtggatgacgaactgctgaaagggctggataaagaattggacgagtttctgaaaaacttgttggagaaataaatatgttcgattgcacggcatgaccttgccgaagcaattatcatttataaaaagaataatcggaagtaaaaggtattcccctgtttacttccgattattcttttttcgttttatatgattcgtacaaacccaagtttccctatcaggagtgactaaaaagtcggtagtgccttaaatgggaatgactaaaagtcggtagtatctaaaactcccctccttcgggaaggaggggtggctgaaagccggggtggtaggtaaaacaaggttgtatctaatttactatgaatgaaagaattgcgtattcacctaccacctccccctgcgggtactcctccttcccgaaggaggagaattaaaatactatcgacttttagtcactcccatttaaggcactaccgactttttagtcagccctctagctgaaagccgaagcagtgtaggtagataaattactttgcttcaatcgctgtccgataaacagattttgccgtttcaattacagtttgtgacttattatccgatgaatcagctgttttgtttttctccgcccatgctttctccataccatagaaattaatcggttcttccgctgattggtcaagtttgccgtccaactcccgttgtttctgctcaaagaaagttttccaacgttgataatacaagtctttcaaaatcccgctccactcccgatgggaataatcatgcagacctccctgattggcagctatactgtctccccagaccgtgatcagcgcagaagcattccattcgtaaagtttcttttcttcttccgtggttcccagagaacgtgcggcattcagccatgaagacaccgagaactcctttcggatggacaacaaattgtcctgagctaatattaactccaaaaactgttgtgtctgtttcccgaagctatccctatctttccggtcataactctgagaaatttcttcaagcagcacattccccttatctgccaggctctgacgcaccacgtccaccaaatcatattcaaagttattatttcccttgtactgatctgcaacagaaagtaacaagcgggctgcctttgccgttgaatcaggtgaatagaataacttggcatatccccatgtcgatgttctgtccagatgaaatcccggacgggcacacaacaaggattcgactgtcccttccccctgataattcttcggagcattgtaaactgtatgttccagcgcacgccatgcttccgctacttccggtgacaaatcatttccataccgtgctttcagatacgcttgcagccattcatccggtgaaaaacgttcttcccgccagggaagctcatacagcaattcaaacatcaccggattattctcgattccttccggagtagctcctaccccccgcaggtttttcccgttgacatgtgcacaggcgttataatatccattcaccagttgctccatccgcccgtgcagaccgacattaccgccaaaattaagcaacatacaatagagccagtcatgcttgccgaaacctttctcccgataccacatcgactccggatcaccccattgcggaagtttctcactatacaaatccagtaccagcaaatcaccggaatcgagcgtactgaccatcgcttcccgcggattcgcctgccatgcctgcatcacccacacagcctccggattcgctttcttcatagcactcataatagaagttcccgcctttgccaagtctactccttccgtatttcctccttcatgaaaggggtccatactgtaatactttgcttttccgtacagtttctccaactcctcataatacatggcagcaaatgaatcgaaatgttcatcttccgtagaaagaaaggccggacgagggaaaccgcaccatttaccgggatcggcaatctgataccccagtttctcgccgatattacgggggaccattcctgcatatccggggaataccggttcaatgcccagctccctcattcgggtaatgatcttcttttgcagtgcttcctgttgccgataccaactgtcgggattcggtccgccccatccttccagattattcatctgccaccatgccataaaggcaggaccggaaataaactcattgatctcctccgtcgtatatccgatacgcttcagcagattataccagacaacctccatccctgttatactcaaaggcatattgatgccgtgcatcgccatccagtctatttctttctcccagcgctcccagtcccagaaagccatggagtaggaataggtacagtaattcaggtaatatcgattcttcatagccgtcgcctgtcggattttcttttgaggcagaggcagtacttccggcaatttctgcgagggattattccacgaaagatgaatacctgccacgtatttcaggtaccaattcaagcccgtagccagtgaaagatcggagtttccggttatcagtactttgccatccttggagtctatctcaaagtagtcctttgccggatcggcttcatcagtaaccaaccggaaaaggatttgatctttcgacgtattctccgtcacacgtgctgccaatgaatcgattggagcagacgtagattggcaacttgtatacataacaacagaactaaataataaaagtaatagaagacgcatgttcatagtcattatttttttaagagtcatcaaatgtgtttgagcgtttggacccctaaatatatttcaaatttccgattactgaaaataaaatgtagttcttttatactgatacacattaaataacctccaatatatgaaaagtcggaaatattcggttgactcaccgactgtttccgacggatagcattggctctaataaagaaagaagatgtgtcaaacagttatttgcacatcttctttcaatttgtgtttcagttaattattactcccatcccggattattgggggccagttctgggtttaatgcgatttcattagtaggcacctgatacagataatacttatctaaccaacctttacctgctaccaaaggatcattatacatatagataaaaccttctttctttcctgtcgtatcggcgtatcctttttcaagatcaacaaactgtccggaatcgccaatctgctctttagtagcccattgaccatactgtatcttattgataaaccaaggtgcctttttccaacggcgcacatcgtagaatccaaatccttcacccatcaattctactatgcgctcgcgacgaatctcccacaatacagggtctacggtctggtcgcgcttcggatcaaatccggcatttatctcggccactttcatatgggcaactcccacccgatcgcgtaacttattgatagtaagatcagcaacagtctgattgaagccctcggcacctgtaccacctttttcaaatttagcctcagcataattcaacatcacttcatcaatcttgaacaaaggtacatctgaggtcccttcattctctttcgaattgtcccatacattatagtatctgtacacatagttaccgctacgggctacgaggaaaccttgtccgccattgttggtgaagaagtgaggcattcctttcaatatagcagcagaccagttcatcaatgggaacactttatgtttaccggcttccccatttccgcctccgaaacctgtgtaacgggtaatgcccatgatatccataaactcacggtccttgggatcagaagtatactcccaactggtattatcggcacttgggatcaccttataagggggagctacagtctccagcagacgaaggtcacgattgcggaaagtagcattcatactattatccccgtcctgcgaccattcatattccgagctgttatgaatcgttttaccatctttacaaagatacatatcgatgatgtgttgcggcatttccacattatgggtggatgtccgttcaacatgagtcagtacataattagtcagttctttttctacatattccttatacagaatgatgcctttcattcctttcaggtcagatgtcagcatctctccccaatcactgttcagttcgggataagaatccatcagtttcttggaataagtgatacaagcatcaaagtacttatcttcgtcccccaaagcatgatatttacgccatgtaccttcaaaaaggcagaaacgggaaagaagagcacggacaacatgcacattgatcgtattttcaccgtcaccttcttcttttatatgctcttcagcatatatcaaatcgttcaatacatgatcggcaacttctttgcgaggtgtacggggaccatatgctatttccttatccgaatcacccagtacacgatctacccaaggcacatcaccaaaacgagctatcagttccgaataataataggcacggaaaaaatatcccaccgaacgccaatgttccttgtccgcatccgtcatccctgagttatcgatatttgccaacatgacattgacccgatagacgaaactgaatgcccatccattgcccgatgaagaactggatacattttgaaaagcatacggattaccgtcaccctgacgacgcatcagataacctgcataaatatcgcttgtataggatgtggcactggcataggctccgtttgttccgggaatacgcaggatattagtatttgtaaatactccatataatccccaggcataggtcttgaaagtattataattactgaacactgtctgctccgtcaacgaagtatccggatagcgttccataaaactatcgttgcatgaagtaaacccgatagctgctgccgcaagcatagtatatattatttttttcataaccaattataaattaaagagtaacattaaaaccaaaagaaatcgtacgatagaaaggatatccccaagacaggcgttccgggtcataacccttcatcagcttagtaaatgtgtgaaggttctcacaacttacgaacgctttcaaactcgttaatgtaataggtgctaaccagctcttcgggaaattataactcaaagtcacattcttgacacgcagataagagccattcatcagatacttcgtttgcgcacgtgtattgtaaccggagttgtttccttgcccgtaaatacggaaatattccgcattcggattggctgccgtccaatcaccattggcagaatctaccggtttccaataatccagctggtctttaaagagtgaaccaaactgtccggaattaaacggccagcggcgtgcatcactgatccatacatcacgtttacctactccttgcagcaaaacactcagatcaaatcctttgtaattgactcccaggtttataccatactgcaaacgcaaagagttattaccgattatcttgcggtctcccggattgtcaaaggttccgtctcccgtatcaatgcgattcgtactcgatccatcatcacgcaaattctggtacttgatgtcgccgggacgcggacttactccatccactgtcaccaccccttctttcaatttccaggtatttgtatcttcaaagtcatcggctgtatagtaaccatccgttacatacccccagatagaaccgatttcatatccttcataataattattcgtgccatcacttttcaggataatcttggattcattatggtatttggtaacgactgttttagagtcataaagattgaagcctacattatagccccatgcaccgattctatctctccaggtcaatgacaattcccagcctttcgtacgcaagtcggcggtattctgcaaaggtgcggaagcacctactactgacggcagctcagttcccggagcaagcatatctttcgtatcacgccgataccagtcgaaagtactttgcagacgtccgttcaaggcagttatatcaaaaccaaagtccaatgtttctaccgtttcccaagtaaaactatcactgaccagtcccggagcattcaaagtcagcggcttcgctccattcaccagccacgccacatccttcttttccacttgcgacatggtcggaacgaatttataaggatcaatgccttgattacctatttgtccccaggttccgcgaagtttcagatcgcttagccagtcacctgcaaccggtttcataaagttctcgcgggcaatgttccaacccacagatacagaagggaagaaaccgaaacgatttttcttcgggaatttagacgagccgtcataacgaccattggtctcaaacaaatatttgcctttataatcataattaacacgatagaaagcaccacgcacggtatacacgcgatgatcatctgtaataaccttattctcaccggtagccgtactatgtgacggatacttctcgttaatcatatcataagaataagtatacaatttcttccagtcactggattcctggttgaagccgcccattaatgacaagttatgcgtgtcattccatgaatatctataattagcatacaggttgatggcattataatcagtactttggtgagtcgtctccagagaagaagtagtggcagtctgtatttttgccagctcaaccgttgtataatcaatggaagccttattcacattctgattactccatgtcttgtcaaatgtatattcaaatgccacttcaagccctttcaatggtttcaataccgtttttgacaggatacgggcattgtctctgattgtattgttatccgttgccattctcaaaacgttggaaggcgtattcgtcatcaggctggtgccgtcaggcaaagtcagggagccttcgggatatacaaccggcaaacgcatatcatacaatccggtcttatccgaagtcacaggcatattcttgtcactctgagcatagcgtatatctacagactgagtcagccacgaggtgatttcggcagaaatataggcactacccgacaaacgtttgtagcggtctttatcggtgatcaaaataccttgctcgctattataaccaagggacagacgataagccagcttatcagtaccaccactcaatgacacattatgtgcttgcagaaaaccgtaatcatcaagcatattggcatacaggtctttctcattcaggtaataattcaatcctgtttccgggtctacatataccccgtctccggtagtctggaatttacccggattcttacgatattcggtcaggtagttcatccatgttttgatatcttgcccggtgtagtatttaccggcattgaactcgccgtccaggtaagcctgcatccactccagcccgtcagcctgttccggacgattgatagaactctggaaaccaaaattattattataattgacatgaaacccgtcgcctttcttcgccttctttgtagtcacaagtattacaccgaaagcggcacgcgcaccatagatagcggccgaagcagcatctttcaacacagaaacactttcgatatcttcgggattcaacatatcgatatcccccggaacattatctatcaacaccaacggaccaccgccattgatggaagtcgtaccacgaatattgaatgatttgctctgtcccggaccggcagcatcattattaggagtaatctgaagtcccggcatcgcaccctgcaaagcactcatggcatttacaacaggacgactccccagtacatcatccatctttacctgagataccgcgccggtcaggttcgctttcttctgtacaccaaaaccaactactaccacttcgtccagactctgtgtgtcttctttcaatactaccgacagcgtctttcccggagttactttcagggactgtccttgataaccaatataagaaatttcaagaatggcgtcttttgaaccgacattcagggtaaaattaccgtccatatcagtgatcgtgccattggaggagcctttttctatcacactggcaccgattaccggttcacctgccgcatccacaactcgtccgcttacttttaccttttcctgatgcgcctgttcgacagatgccaactccgtggacagaatgatctttttatctattaccttatattctacattcgtatttttaaatacttcgtcaagaactttaaagatatcattacggttagcggagattgtcaccaaccgtttcaaatttatatgagcattgttgtagaagaaactaaattctgtttgcttctctatcgctcttaatacatcctcaactgtctgattacgtacattcatcgtaacctttgcagattgggcataactatctgtcgcattagttaatccgacaaaacaaaataagaataaaataaccagtctcatagtacgtgggatttttttcgaggttagccaaaaagactttaccacccttaaaacttggatgctaaaattgttttgcataattttgtattgatttaagttgaaaatgagttaactatgcttgtctgccaacaagcattttcaattgattcattttagtatggggagatctgccaaaatcttcccatacttttttctaagtgggttttgccttcatattattaaattgttaaaggttaatcaataaatttctattatctcttttttcctgtcacttccatccttatcatcattgatatgttgccaacgtattttagaggatactttaaaatattccagaatcttctccaaacgttgatttgtaaaggttcccgtaaacgaactattcttcagtttttcgttcttaataacaaatttcacactatatcttttttccagcatccataatgcttcttccaaaggtgtattatcaagaacaacttctccatctttccaagccaattctgattttcccgaagttttataaaggtggactttatcagtctccgaatcatacaccagcttctctcttggagataagaacacatgtttcaccccagcatctttctcgaacataaaatctacttttccttcaatcaaagttgtaataacctctgtattctgttcatatgcttccacattgaaacatgtacccaatacttctatctgtgattgatgtgtagtagaaaggataaatttcttttccggatctttggccacttcaaagtatgcttcaccacttaacgtcactttacggaaatctccattaaagcgagaaggataagacaaagaagattccgaattcaaataaacaattgtaccatcgggtaatgtcaacgaagtggtcattccaggactagtcttaacttccatcatctccgctacctcaccagtatcccctttccaattctgccatataaataaggtaagaagcggaataaatagaattgcagcagcacgttgtgcccactcccaccacactatccttctcacttcacggtccgacatttttccctttactttcagtaaagctttctccgtatcaactttcttcattacctgaaccgtgtccacagccaaataaagagcaaaagtctgagtagcaactcgtttattctcctccgactcgtccatccacgcttccacttccagacgttccccctcgctcaacctcccctcacaataacgaggaagcaattcttctattctattattatctaattctttcatcctttattctaccttttattatatgacaagaccaaaccatgacattcctaaacgaaaaccttatttttttcagaaaatctttattttattataaaaaagctatatttgcagcaaattagaatttaataaatgaaggaactacgcataaagaggaatgaccctcaattatctgaaatacagcgtggaggcctaaaagcctttgaaatgctattcaggcaatactatgcagtgctatgtgcctatggtcataaatatgttgactttcacgatgcagaagaaattgtgcaagactcccttctatggatatgggaaaaccgggaaaacctaattattgaatcatcattaagttcttatctctttaaaatggtacatcacaaggctttaaataagcttgcacacattgatgccatcaaacgtgctgatacgcgtttctatgaagaaatgcaagagatgatacaggatatggacttctatcaaattaaagagctaaccaaacgtattgaagaagcggttgctgcattaccggaaagttatcggcaagcatttgttatgcatcgtttccgggatatgagctacaaagaaattgcagaaacattggaagtgtctccaaagactgtagattatcgtattcagcaagcactcaaacaattacgcatcgatttaaaagattatctgccattgctgcttcctttactgtttccttaatataagtgactccttccaataaattggattcgtacctattaaatctataccatccttcaactaaatagagaaaaacggtctctttttaggtaaagttcttttttgctctatcaattaaagctataaaacagaaaatagtaaatctgtatttatctatagtacaagctgatacagatcataaattctcaaccattctcatcatgatgagaattatttctcaccacagtgagaactttttctcatcacagtgagaatcttttctcattgcattgagaattttttctcattgtggtgagaatattgtctcatcgtaataagctgaccaaagtcttggaagtctgcaatacataaaacaaacaatcataaaggataagaagacagatacaatcctattcttgccgataaggtagcgtaaaccagaaagtagaacctttgttttcctctgattcaactccaatcgtccctcctaagcgatcgataatcatctgacaaatggaaagtcccaaacctgttccctgaacaaaaggattgtatttcacaaacctttcgaatacatgcttgcattgctcttctgacatgccgcagcctgtatccgagacataaaagcaaattgtatcggcatccttcagacgatatcccattctgatagaacctgtctgagtaaatttaatagcattgatgacaaaattggaaatcagttgtatcaaacgattcttatctgtataaagggtacattccggcagacgttcggtaaaagtaagagtaacagtttcttttttcaagcgaagcctcatgctctgttcgatttcttccatcgtctggttgacatctatcaatgacgggcagaagtcaaaagtgccggcttcgattttggacatgtccagaatatcattgatcagttgaagaagcaagtcggtatttgtttcgatgatgtctgcatattcgcgcatctccttacgatcttctatatccggcaacatattcgagaagccgacaatcgcattcaacggagtgcggatttcatgactcatattagccagaaaggcggatttcaactgattcgcctgctccgccttttccattgcctcactcagacgagtgtatgccttgcaaagaatacgtatataataggcgatcgctgctatcaaaataagaaggaaaatggaacaggaaaggatttcaacacagtattgatgaaatatacttttaggttcgttgacataaacagctcgttcaggataaaggtgatagggaatattgtaggattccagcactggataacagaggtaggcactcgccttccctcctatactttcgggaatgtcctccgcctgttctccatgcaacacacggtcaataatttcaagtaaggaatcgccgaatgattctgcagaaacgtaatagcctcctgcaaaagtattattggacaggtcttcggaagaaagcaggaacaagggagaggacgtaaaattggtgataatctcctgaatatgatcaaaaagataattattatcttctttattatgcgactcaaaccaggaataataaataattccggtgtttgctttatagctgcgcaaggtgtccagaagcatttctgttgacaagtgagtggtagaaagcaattctaaaggcaggtttggaaaatgcttttcaacagcttctttcacgtctccgcgggtttcttcactgatgtagcgatcgtccgagataaatgccaggcgatccatatcaggtatcaggctatagatcagttcaacggtttccttcacatagtaatgctgtttcagggtagtcaggttgtagccttttctccactcttgggcggggacactgttggtctcattcaacgaggcatgagagagcagaatatccaaggtagcaggcaggcggtcacgggagttcgttatgatcactggaacatctttccataggtcatcaaataaaggacgacagacaatccagcccggatcaccaattatcacaatagcggcaggaggaagcggatatttctgacgcagatgctcgatgactgcatttacctccatcgtatcctgcaaggccgggacagacaatgattccgctctggcagttattccctgttcctgaagaacatcgtgcacataccaatagaagtttctggcccagggaaggttgaagttaatagaattcaaaactaatatttctttatctgatttcccattatctgccaacataggggaaaggagtccttcgaaaagaagaaagaacgcacctgttaagcatattcgcagtaattgtttcattttgctgtgtgattaaaagtggaagcaaagatagtattatttttatcttttaaaaagaaaggcatcccaaatctatcgggatgcctctccattacatatttttatgtatcagttcattatgccttttttaaagctgcgatgctttctttcaaagagctgatgatactttccgcatcggcctgcttcttacgttccatttcgagaacggctgcgggggcgttattgacaaatttctcattgctgagtttcttcaatacaccttgcaggaatccttccttatgtttcagttcagcttccatacgggcgatttcggcttctacatcaatcatattgcccagtggcacagcgtattcggtagttcctaccatgaaggaagaagcaccttccgccttgctctctaccactgtaatggaagaaaggttacacatcttctgaatcaccgcattgaactctgcaaccggattttcgcccagcacctgcaagtcaagcggttctttctgagctatgttcttttgcagacggatgctgcggatattactgataactcccttgacaacttcaaactgtgcaacgaatgcggtgtctacataagtatccatgctcaatgcacttaccatcagactttctccttcttccgcattacgttcgtacatctgttgccacaattcttctgtgatgaacggcataaacggatgaagcagatgcaacaggttatcgaggaagcagagagtagcgtcataagtggtacggtcaattccctgtccgtaagccggtttaatcatttccagataccaggaagagaattcatcccagaataatttataaacagccatcaatgcttcgctcagacggtatttactgaacaagtccgctacttcggcagctacttcgttctgtttggattcaaaccagtggacagccagtttagcagcatccggagcctgaatattatcgtcaaccgtccagcccttgatcagacggaaagcgttccatatcttgctgcagaagttacgtccctgttcgcagagtgcgtcgtcgaaaagaatatcgtttccggcgggagctgccagcatcattcccatacggacaccatcggcaccatatttgtcgatcagttccaacgggtcgggtgagttgccgagtgacttggacatcttacgtcccagtttgtcacgaacgatccctgtaaagtaaacgttcttgaacggcatctttccttcatattcgtagcccgccatgatcatacgtgccacccagaagaagatgatatccggtccggtcaccaggtcgctggtcggatagtaatagctgatttcctcgttacctggatgattgattccgtcaaacagggagataggccacaaccaggaagagaaccaagtatccagacagtcttcgtcctgacgaagatcatccatcgtcaaagcggcgtttcctgttttctctttggctttagccagcgcttcttcgggagtagtggctaccacatagccaccttccggcaggaagtaagcaggaatacgatgtccccaccacaactggcggctgatacaccagtctttgatgttctccatccagtggcggtatgtattcttatatttggcaggatagaatttcaactcatcgttcattaccggaggcaatgccatatcggcaaaatgctgcattttgaggaaccactgcatagacaatttcggttcgatcactacattggtacgttccgagtaacctactttatttgtgtaggcttctgtcttttcgagcaatccggcagcatcgaggtctttctcaatctgcttgcggacgtcgaaacgatccataccgatatacaatccggcagcttcgctcaaagtcccgttatcattgaagatgtcgatgctgggcagattatacttttcacccaacatatagtcatttacgtcgtgggccggagttactttcaggcaaccggtaccgaactcaatgtccacataatcgtcctcgatgacagggataacacggtttaccaacggaacgattactttctttcctttcagccatgcgttcttggggtcgttggggttgatacacattgccgtatcgcccatgattgtttcgggacgggtcgttgctactactgcatagcggccttccggatcaccttccaccttatagcggagatagaacagttttccgtgctcttccttgtagatcacttcttcgtcagaaagggcagtcaacgctttcgggtcccagtttaccatacggacaccacggtaaatcaatcctttgttgtacaagtctacaaatactttcaatacgcttttgctgcgttcctcatccatagtaaaggcggtgcggtcccagtcacaggatgcacccagtttgcggagctgcttcaggataatgcctccgtgctcttctgtccagtcccaggcatgtttcaggaactcatcacgggtcaggtctgtcttcttgatgccctgggcagcgagtttgtttacaacttttgcttcggtagcgatggaagcgtgatcagttcccggcacccagcaggcattcttgccttccatacgggcacgacgaaccaaaatatcctgaatggtattattaagcatgtgtcccatgtgcaacacaccggtgacgttcgggggcggaatgacgatggtgtaaggttcacgaccatcgggtttcgaactgaataaacggtgttccagccaatactggtaccactttccctccacgtcagcgggattgtacttacttgctaattccatgtttctttatgtatatgataatgtatattcaaaaaataacggctgcaaaattaataattttaattcaaatcttaccacccacaggatgtttctgtgcccggaaagataatttatatccctcataaacagcaattccataaaataaggcggacatcgacaccacattcttcaccatgacagaaaagatttcaccataatcgactcccgccagcacttcgaaaaaggtcatatcataatccttggcagcaaagccgatgatggataagaaatcacccagcacacaactgatcaatgccagtgctgccccaagaagaccgaagacgggacgtatccccttcccctgccgcatggcgaaaccgaccagaaatccgactccgatagccatatatcccatctgaagacctgtagaaacggagatgagactccatgccaccgcccccaagatacatgcgacggatgcatacagcactcctttgggaagattttcttcggcgagaagttcttcttccgtcattgacaccggaaagtcgtcgggcttgggaggagccatcttcaacagttcttcatccttctcgaagttttcgcattcttcgtcaaagtcaggaagctctctggtgcgtttgcaaacaagccctttcccattcacgaaatcacgtgacacgcaattccggcaatacttttcaatttcttctacggtagccatctttcgtttaacagtttttttgcaaatatagaggtattttttcgcgtgacgtttatttaatgcatatttttgttgactaaaatctgaacggatgatgaaacggaaactgataattagatatatactcctgggagtactgctgcttctggtatggatgacacagtcgattcccgcgttgggaaacctgtattcacaaaccgtttatcctgtcatctcccgcgttttgtcattcttctccaacttattcccttttgccataggggatctatttattttcgggagtatcacgggagtcatcgtttatccattttatgcccgtatccgcaagaaactgccgtggaagaggatcctgctgcgtgacggagaatatctgttatgggtttacgtatggttctacctcgcatggggattaaactattcgcagccaaacttttaccaacgtacgcatattccttatacagcttacacaccagagatttttcaagagtttgtggataactatatcgactcactgaacagttcgtttgttcccgtaaaaggaatacatgaggaacaggtacgtgacgaagctgtcaaactttacaatcaattaagcgacagcctgggagtgcaccgcccgccatttcccaatccacgggtcaagacgatggttttcaccccattcatatcaatggtcggagtgacaggaagcatggggcctttcttctgcgagttcaccttaaacggagacttgctccccatcaactatccggcaacgtacactcacgaactggctcatctgctgggaatttcgagcgaggcagaggccaatttctatgcctatcaggtttgtacccgttcacaaataaaaggaatccgtttcagcgggtatttctcaattctgaatcatgtactggggaatgcccgacggctgctgagtgaaaaagaatatgccaatataatcaaccgtatccgaccggagattatagaactggcgaaaaagaatcaggaatactggatggctaaatacagtcctttgatcggtgatgttcaggactggatatacgacctttatctaaaaggaaacaaaatagaaagcggaagaaaaaactattcggaagtgatcgggctgttgatttcgtatcaagtatggaaagcgaaaaacacgtcagaccaataaaaagacttttattagcgtccttgcttctgttttcgtaccgattaaggctataaaagacaaggaagcattatctttgcaacattatttataaaaaaatcaaaggaatgatacatacaagagaagaacagatggaagccttcggccgctttctggacatcctcgacgagcttcgggttaaatgtccgtgggaccgcaagcagacaaacgaaagtctgcgccccaacactatagaagagacttacgagctttgtgatgccttgatgagggatgacaaaaaagatatttgcaaggagttgggagatgtgctgctacacgtagcattctatgcaaagatcggttcggagacaggagacttcgacatcaaagatgtctgtgacaagttgtgcgacaaactgattttccgccatcctcacgtattcggagaagtaaaagctgagactgccggacaggtatccgaaaactgggaacagctgaaactgaaagaaaaagacggaaacaaaagtgtattaagcggtgttcccgctgcactcccttcactcatcaaggcttaccgcattcaggacaaagcccgcaatgtaggcttcgactgggaagaacgggaacaggtatgggataaggtaaaagaagaaatcggagaatttcaggcagaggtagccaatatggacaaagagaaagcagaagccgaattcggtgacgtcatgttcagcctcatcaatgcggcacgcctctacaaaatcaatccggacaatgctttggaactaaccaatcaaaagttcatccgccgtttcaactacctggaggaacatacgattaaagaagggaaaaacctcaaagatatgtctctcgaggagatggacgctatttggaacgaagctaagagaaaaggactgtaacaccattcgacttccttatggaatggatataatacctgtccaaactctgttattcccacttccaatgttctactcttttagtaaagcaacaaagatacatccggaaacaaaaatcagaggctctatcctatgcggatagagcctctgatttactctgacagagcgtctgtttcatcccaacagagcctccgttttatttcttccttttcggatcatttcctccgtccttgcggttcatgcctttcagcatttcccgatggaaacgcatctctgcacgttgaacgaggaatatcttcttgttggaaagtatctttttaaaccggtccagataagacttatcaagacggtcggcagcgatacggttgtcacatacctttgctacaatttcttcgtactgggcttctgttgttttgtcgtctttaccttgacgcattaaactccacgattcatcgttcagtttcttcttcttctcctgcagttcaaaataaaccgggaagaatttggcagcctcttctttggttaatccggcctgctcaataatgaacgctttctgtttattccggaattcctcacgggacaaatgctggtcacatccatcggcagcccaaagaacaggcataaagccacataacaaaacgactaaagcgattagtttcttcattttcttattcaatctgttttaataaatcattctacactcgcgtcactcagatagacgtataacgaataatcatccaacatcgcacggtctaacgcaacatcaatcatctcgtcggatacctgttccgtatccgcttccatagccgttactgccaccgctatatcatctgccaccggtttatggtctgatgacgctacccggataatcagggcagctcctacaaacatagccgccatatagaataatggtttcaatctcgtccatgtcgaaacatgctcttccttgaaagcgactttctctttttcaggaagtttgttcatcacctctgaagtcagattttcaaagtaaccgtcgggcactttgaaggaatgctcctttccgattttcttcaatagggtatcttcttctttcatacgtttttctcctctcttttgattagacgatatctgctttaaaaggtttaatctacttcttccaaaaacttctctattttctttaccgcatggtgataggaggctttcagcgctccgactgaagttccaaagatttctgacatctcttcgtacttcatttcctgataatacttcaggttgaacaccattcgttgtttttcgggcaaggtcagcaatgctttctgcaataacatctgcacctgatcgcccgaatagtagggatcactctccagtttctgcacaatcgccgcttcgggatcgtcgatagccaccgtcgttgtagcacgctgcctgttcagaaaagtaagacattcattcagcgcaatacggtagagccacgtagacaacttcgcctcggcacggaaatagtcaatatttgtccatgccttgatgaaggtgttttgcagaaggtcgttcgcatcttcatgcgacagtaccatccggcggatctgccagtataactgctcgctgtattgcgccacaatcaactcaaatcctttccgctgtgtactctcctcctgaaggagtttcagaacctcacgttcgttataaggggtcatagtctctcgtatctgtatagttatttatggttatgcacatattctctcttgccaaaaccgtttgggggaagatagccgccgcttcattcaacaatacagactcgtcctcataacgggcggaaaaatgtccgatgactaattgtttcacttcagcattcaaagcaatctgtgcggcctgtgcagcagttgtatgatgagtttcccttgcccgcacctgttcggtctgagcaaaggtggcttcgtggaaaagaaggtctatcccctttatctgctccacgatctcaggtcggtagatcgtgtcggagcaataagcatattttcgtgcaggggcagaaggacgggtcagacgatgattcggaatgacttctccttcgggagttacaaaatccgctccgttcttgatccggttcagttcgtaaacgggtactttatagaaatccaccatatctctgatgatatgattgggacgctgcttttcttcaaaaagaaaaccacagcaaggaatacggtgtctcagaggaatggtggtcacagccaccgagcggtcgtcatagatcagcgtcggctccttcgtctcaaattcatggaaaaagactttataggccagcgttttgcaaaagaaagaaagtaagggagcaaacagttcttccagtcctttgggtgaatggatatgcaagtctgccgttcgtcccaacagaccgaaggtagaaatcagtcctaacagtccaaagcaatgatcgccatgaagatgggaaataaagatatgattcaagcgggaaaacttcaagcgggaacgacgcaactgcatctgcgctccttccccacagtcaatcataaaaagcttttcacgcaagttcacaacctgcgatgtcgcaaaatggcgagtggtgggcaaagcagaaccgcatccaagtatatgtagttcgaatttctccatagcggcacaaatgtacacaagttttttggtatttgcgctatcatggcaaaacaaaaaaagcgccccgataaccggagcgcttttccattatatagaaataacgattatttctttccttccaactgttctttcaaagcagccaaagcgtcgatgtcgcccagcgtagttgaagcagcctggttctggatcatcggagcatcttctctcttgttgttagaagacttcttagcaccggaagcagctttcttttctgctctttcttcagccttagctacatcttcgaagatacggctgtgagacaggatgattctcttagcgtctttgttgaactcgatcactttgaattcaagtttctcatccaactgagcttgtgaaccgtcttcttttacaaggtgtttcggagttgcgaaaccttctacaccgtaaggaagagctacaacagcacccttatccaacatttcgatgatagtaccttcgtgtacagaacctacagtgaatactgtttcgaatacatcccaaggattttcttcgagttgcttgtgaccaaggctcaaacgacggttttctttgtcgatttccaatacctgaacttcgatgtcagcaccaatctgagtaaattctgacgggtgtttcactttcttagtccaagaaaggtcagagatgtggatcaagccgtcaacaccttcttcgatttctacgaatacaccgaagttagtgaagttacgtacttttgcagtatgcttggaacctacaggatacttctcttcgatagtttcccatggatcttgtttcagttgtttgatacccaaagacatcttacgttcttcgcggtccagagtcagaactacagcttctacttcgtcgcccaccttcatgaagtcctgagcagaacgcaggtgctggctccaagacatttctgatacgtggatcagaccttctacgcctgtagcgatttcgatgaatgcaccgtagtcagccatcacaaccactttacctttcaccttgtcacctaccttcaagtcagtgtcaagagcatcccatgggtgcggagtcagttgcttcaagccaagagcgatacgtttcttttcgtcatcgaagtcaaggataacaacgttgagcttctgatccagttcaaccacttctttcggatcgctaacgcggccccaagaaaggtctgtgatgtggatcaaaccgtctacgccacccaagtcgatgaacacaccgtaagaggtgatattcttaacagttccttcaagaacctgtcctttttcgagcttgccgataatttctttcttctgttgttccagttcagcttcgataagagccttgtgagatacaacaacgtttttgaattcctggttgatcttaaccactttgaattccattgttttgccaacgaatacatcatagtcacggatcggtttaacgtcgatctgagaacccggcaagaatgcttcgattccgaatacgtctacgatcataccaccctttgtgcggcacttgatgaatcccttgataatttcttcattttccagagcagcgttaacgcgatcccaagaacgagtagcgcgggcttttctgtgtgacagaacgagttgtccttttttgtcttcctggttttcgatgtatacttctacagtatcacctaccttcaggtccggattgtaacggaactcattcaaaggaatgataccgtctgatttgtaaccgatgttcacaactacttcacgcttgttcattgcgattacggttccgtcaacaacctcacggtcgttcactttgttaagcgtactgtcgtaagctttttctagttcttcgtggcttgcgcttgttacagcttcgccgttttcataagcatcccagttgaagtcttcaataggagctacgttctttaagttttccattaataaataaattgtttaatactttaattgaataagacattatattatctataaatcgggcgcaaaggtaggaatattttcttgaccgacaaaagaatacccaaagaaaagatggtaatatccgtattttttgtaatattgcaaatctaatattatacgactttcaacatgaacggaacattggacaaaatcagggtgcagtttgattatctgccacttattaatttcgcgatgcagcaaaacaaagtatcggtcatccatcagctttcgattgaaaacatgacgtccgaacccttcagaaacattcaggtacaaatcacggccgagcccgacttcggcagtatcactcctgtgatggtggaagcgattcccgccaatgattccgtgtgtttgcaatcgttcagcctggtcttgtccgccaattatttcgcccagctgaccgagcgtatgtcgggaagcctgaaaatagaaatccgctccgaggcggaaacgatctttacccggacctaccccatcgatattctggcatacgaccaatggggcggaatcaatatattccccgagatgctggcagcgttcatcaccccgaatcatgccgtgctcactcctattatcaagagagccgccgccattctggaacagtggaccggtactccgtcactggacgaataccaaagccgcaatccggaccgtgtgagaaagcagatggcagccatctacaccgcccttaccgaacagcaaattatttacagcaccattcccgccagcttcgaagagcacggacagcgtgtccgtctgacagattccgtactggcacaaaagctcggaacctgtctggatatggcactgctttatgcttcctgcctcgaatccatcggactgaatgccctcatcgtcatcaccaaagggcatgctttcgcaggcggctggctggtgccggaaacctttccggaccctgccatcgacgatgtatccttactgaccaaacgaaccgccgaaggaatctacgacatcacgctggtagaaaccacctgcatgaatatgggacataatgccgacttcgacaacgccgtgaaaagcgcgaacggcaaactgagcgatccgggcagtttcatcctcgccatcgacgtcagaagggccaggcattcgggagtccgcccgatcccgcagcgcgtactgaacggacaagtatgggaaataaaggaagatgaggatatgaacagaaataccacgcacgccactccgcaaagcgtgaatccatatgatttgtcgggtagcgaaactcagacagtcctcaccaaacagttgctttgggaaagaagactgctggatttgagtctgcgcaacaacttgctgaacatccggattacaaagaatactcttcagctgattccggcaaaccttgcctgtctggaagacgccttggcggaaggagatgagtttcgtatcctccaccgtcccgccgaatgggagaatccggcgatggagtttggcatttattcttccataccggaatcggatccgatagccgacttcgttaattcggagctttcacagaaaaggttacgtttttacttgccggagaatgacttgggcaaagcactgactcacctgtaccgttcgtcccgtacttctatcgaagagaacggagcgaacacgctttatctggctctcggacttctgaaatggtacgaaacgccttccagcgagcgtccccgttatgcaccgatattgctgctgccggtcgaaatcatccgcaagtcagccgccaaggggtatgtgattcgttcgcgggaagaagaaacgatgatgaatatcaccttattagaaatgcttcgtcagaatttcggcatttccgtaccgggacttgatccgcttccgacggacgaaagcggaatcaacgtaaaactgatttattccatcatccggcactgcatcaagaatcagcgcaaatgggatgtggaggaacaggctattctaggtatcttctccttcaacaagtttatcatgtggaacgacatccacaacaatgctcacaaactgactcaaaacaaggtggtctccagcctcatcaacggaaagatcgaatgggacgtaactgcggaagaagtggatgccgcctacatggacaggcagttatctccggcagatattgtactgcctatcattgccgattcatctcagctggaagcgatttatgaagcggtgcacgacaagacttttatcctgcacggccctccgggaaccggaaagtcccaaacgataacgaatatcatcgccaacgcgctttataaaggtaaacgagtcttatttgttgccgagaagatggcagccctctccgtcgtccaaaacagactggcggccatagggcttgccccgttctgtctggagattcactccaacaagacaaagaaatccactgtcatctcgcaactaaaggagacaaccgaaatcatcagacgaactcctcccgaagagttcaggaaggaagccgaacgcctgctgaagttacgaacggaactaaacaaatacatcgaagccttacacaaggaatatcctttcggactttccctctatgatgcgatcatccactaccagttaacagacgttgaaccctgcttcgatatcccgtcatcttatctggacaatctggacaaagaccgattctcacattgggaagatgccatcgaatctttggtcagtaccgccaatgcttgcggtcacccgtatcttcacccattgacagggattttcattcgggaatattcgtccgccatcaaagaggaagccttacaaacgctcgccactttcatcggcttattgactgccatacaatcgaaactgcctgtcttttccgctttactggaaaatacggacattcatcccacccgcaaggatttcaatataatcagcgccattatccgaaaaatactcgatattccggaactgacgcccgaactgctgaccactcctttattaaatgaaacgctggaagagtaccggaaagtgacggaacacggcaggaaacgcgatgaaatcaaagcagaaatagaaaacggattcaccaaagaggtactgaagataaacgccggccccatgctggccgaatggaatcgggtatccgcccaatggtttctcccacgatatttcggacaaagaaaaataaaaaaggtgattcgtccttacgctctgcaaccggtaaagccagagacagtccagcctttgctccatcaggtcatccggtatcaggaagagcttgattttacagacagatacgccgccaagctgccttctttattcggaagattcggaagagatgaagagtggcccatcatcgatcagatcatccatgaggtatcttcgcttcattccctgttactgagttattcaaaagatgtggcgaaaacatcccgaatcaaacagaacttagcgttacaactgacagaaggtatccggacattcagagatatccattctcattctctgaatgaattgtatcagctggtcgacacgcttacggcaaccgagcaacggctttccaccactctgggcataaccgtagagacgctttatacaaactccgccgactggatcggcatcgccctacagcaagccggaatatggaaagaaaatctggacaaactcaaagactggtatcaatggcttcaatcctacaacaaactgaacgagctgggtctcggatttatcgcagaagaatataaggaaaagaatattcctacggatttactcaccagcagcttccgcaagagtttctaccaagccgttattcactatatcatcgccaaagaaccgacgctggaattattcaacggcaagatattcaatgatattataaccaaatacaagcaggtatccgccaacttcgaggacattaccaaaaaggaactgttcgccagactggcttccaacattccgtccttcacccacgaagccattcaaagttcagaagtcggaatattacaaaagaatatacgcaataatgcacgcggaatatccatccgcaagctattcgatcaaatacctatcctgctgtcccgtatgtgtccgtgtatgttgatgagtcctatatcggttgcccaatatatcgatgccgatgcagagaaatttgacttgatcgtcttcgacgaagcttcacagatgccgacttacgaagcggtaggtgccatcgcccgaggcaagaatgtagttatcgtaggcgaccccaaacagatgccgcctaccagcttcttctccgttaataccattgacgaagacaacatcgagatggaagatctggaaagtatccttgacgattgcctcgctctctctatcccttccaaatacctgctgtggcattaccgaagcaaacacgaaagtcttatcgctttcagtaactccgaatattacgataataagctgatgactttcccgtcaccggacaatattgaatcgaaagtcagaatggtcgccgtagacggttattatgacaaaggaaaatcccgtcagaaccaagcggaagcgcaagccatagtagacgaaatagcgagaaggctgaggagcgaaaaattaaggagaaaaagtatgggggtagttactttcaacgtggttcagcaggcgttgatagaagatttgctatccgatctcttcgcctttcatcctgaactggaaacctttgcgctggaatgtgaagaacccctgttcatcaagaaccttgaaaatgtgcaaggagacgaacgggatgtgatactgttctccgtcggctatggtcccgatgccgaagggcgcgtcagcatgaacttcggtccgttgaaccgtgcgggaggtgaaagacggttaaacgtagccgtctcccgtgcccgatacgaaatgatcatcttctctacgctgagatcggacatgattgatctgaaccgaacttcttctatcggagtagccgggctgaaacgcttccttgaatatgcggagaaaggaaccaagcgcatactgaatacctcgactaatattcggacctcggaagaagaaacttctatcgaaaagattattgccgacaagttacgttcttcgggatataccgtacatactgatataggctgttccggatataagatcgatattggcattgtcgatactcaaaccccgtccaactaccaattaggtattatctgtgacggaaagaactacagacgtaccaagactgtccgtgaccgggaaattgttcaaaacaatgtactcaaagcactgggatggaatatctgccgtatatggacgatggactggtgggaaaagccggatgaagtgatggcgtctatacaagcagcgattgctcaggatatgaaagcggagaaaccggttatagtaaaaaaggaacaagaaaaaagagaaaagaatgtgcaggaaacgccgatgcagctaaaatctgcatgcgcatacacaaacttttcttttatctccgtacaaaattataatagtactaaaatacgtccgttcctgtacgctgccgacgacatcttcgctaaaagaaataatcctattattgtctcccaagtccaaaagataatagaaaatgaagccccgatcagcaaaaccttacttggaaagaaaatcatatccgaatggggagtcaaccgtgtaggaccacgaatagatgctcaattggaaataatattcgacacattacatctttaccgcatagaacatgacgggcttatcttctgctggaaagatgaagcgcaataccgttcttattcagagtaccgtcccgattccgaccgagatgcagcggatctgccacccgaagaaatagccaatgccatccaacaaatattaatcaataccatcagcctgcctttacccgatttggcaaaagcatgcgcacaagtattcggcttcacacacatggggtcaaacatcgaagcatccatgctcagagggattcaggaagcggtaaaaaggaattatgccaaagttgaaaacggaagggcaacgatcatcgattaacacggtaaggcagacacaaacagccgccacccgtcaataccccttctgcaaacgtttcagagcagcaatagaatcagctacatacgtattatccggttctatggaacgccaataacaaagcgaccctatcaaccgtttcagataagcaggatcatgggagccgattctgcgttgatgttccgccagcccctttgtcaaaatgaaatagacattcttgcgaatctctctctttcgggctttaggaatagtcagcttcacaccggagctgacagatactcccgtgattatcttcctgtcattctcattcagaaaacgggttttctgatgattcggttcaaacttctcttccctgatgatttcctttacccgcgcaagcacctgctctttcggaaagacatcgcccgaaaaggtgaggtcgtcggcataacgactataagtcagcccgaattcttccgccatcaccgccagtttccggtccatctcataagcgatgatgttactcagtaccggactggtagacgctccttgcggcaaatgccgacgcatacaacacaactcgcccagcactttcgatatattcttcggatagccgatcttttcgaaagtctttttcaccctcggactacgtatggaaataaagaaatcatggatatccgtcttcaagacacagcgttttcccagatgaggacggacgttatcgacgatggaatgctgacgccggaatcccgtagcggcaggatgcacatttacagacagtaatatacgatgataaatagtatcctgaatggctttcagttccttgtccggagcagagatcatacggtatcctcctctccgctttctgatccagaactcccgataatgcgaagagacatcctgcagtatctctttcaacctcatcacctctattcccaacagattggcacaccacaccaccgcctcttcatcaaatacaggacatgttctcattttaggagtgactactcctaaagcatgcctgagccaggttccatgttcccatttgtttttggaagtctcttcgttagtagtattaccgctgcctgttgctttccatctcttatatccttcctgtttccggctcgaagaaatcaatttataaatcagaaaaccggtaacaataagtatcgtaattaaaattccgtccatcttgttgttacatatataaaaaggagaagaagaggatgagattttactaaaataaatagaggtatttataccagagatttattttccaggaaaatacctgtgcctgcgaggcgactacacctcttttctgctaaatttttcctcatcctcttcctcacaaagatatgtattttctatacattatgcaactgttatgaagaaaaaactatcggttaaacaactcgaaagtaaatttacatccgatcccgctgaacttccagttctcactgctgacgaatactcccacatcaaagacatgcgtaccgataccataacccacttccagatatggctggagatgcggcatagagagcgcactgatataaagacgttcgttctgcacatagcgggtatatttcatcaaatgccggagaataaggaaaggagcctcgtaagtgaaatgtccgcgtacatagcggcgggaggagttgtaccaacgtccgtcgagcacctgaaacacaccaccgatttcatcattccaccctaccggcagattatgacgggcaaaattggcaaagtccacaaagtacagttcatcctgattggtaaacgccccgaagccgaaacgataataaatatttcgcatcagccccagctgaatcttatgttgaaggtcgaattctatccgttcatattctccggtacttttaaatactccttctattccccgttcatagtccaccgaaaatgtcggatagtcagagcggagattgatcttacgctttccgttcatataataataaagcgccggagtccattccacccggatgcgcggggcaaagctgatataggtatttctgaagcgttccataaattccggcggaggcatcggatagtcacccgtaatcacaaaacgggatttctcgacagctgttctcttgtgtgccgagaaaccgaggctgatatccagtccgttggtaatttcaaaactatgacggaagttgaaatacaagtccttgaaataatccagatggatgaggtcgaaattaaagatactgtccggcatcgctttcagttcgtccagcatcttgctgctatagatacggttaccattacccacactcaaccggaaaaagccccgtttctgcggccagtactcaaagtcggcattcagcgaccagtagaactctttccgtgtaaagttataacccagtttgggtacgatgcggagccacttgtcgcctctgaaaatccggttgtaacggaaatcctgccggtatgataatccgttgcttccgctataactgaacaaaagcggattgataaacggcgagaagcggacacttccgatattggacagattgaatttataatcttccaccatcaggtcgcccatcgttccccagaaagcctgactcttggattttcgttgcaccgacacggtatcccgtctgtatgcgtaatccttataaagttgtttttccctgtcactcaaaggaatgggacgtaatacgccaaacgtggaagcatctgttttataggcattcgtatcacactgcaaggagaatgattccgacaaattatactttttcttctccttcttccgaacctttctttctttcagttctattgatttatagtccaacgaagcggtataattgccgtccaccttattgcccaggaacttaaaaagggcctccacatcataacgcaccgggagaaactcatctttctttccaacttcccccatcttgatccagcaagtaaacgtaatcagttccgaccgtcccgaaaaacgtatttcacgcacgctccatacattgctgctgacaatcatatagccgcccaccagctggtcgctcttggtacggggaatgaaacgtatccggtagtcgagattattgggatcgcccatcacactgtctatccggtatttgtagtatttctgcccgttcttggcaagcggagacagcaagcgttcgtcattcagaagagaagatgagtagatattgacactaaaatattcaagcagccccggcagtcccctgtttcctctcacggtgccttgtgatgcctttactttttggtcatagatattgggagctgtataatgcaggtcactatacgtttcgagcaagtattcacgtacccctttctgcaagcgaaacatcgaaggaacgtaccggaggataaaattcttcttctgaatattcatcttaccctttatatataggttcgcgcgatagtcgctcactatactttcataagagggagcaaaagtcatgacacgctcaatgatggaatcagcagatatctcctgacttgtataaggattaagaacaagattggctgcccccttcggaataaaagagaacaagcacaacatacatcctatcaatatcttatatttcaatcgtcgtatctccttgtttattgtaggcaaatataaaaaagaatatcgaaaagcaagggaattaagctgcaaaaaagagttagcaaggaaaatcctttccccatgccacgcatcatatcagttttcatggacatttttctacttatgctacattcacatttctatgtagaaggtgattcattcttgcatgatttaaatcacttctgcacagttatgggtcatcttgaggcaggctataaactaatcctgattaacacgttttttacctcttatctttaataaatctatcttcgactatacataaaactattcgtctgacagctgttattttttcgtctgacagctgttagacgaaagagtaacagttgtcagacgaaagttcaacaactgtcagacgaatagatttaagtataatggggactagttctttgcaaaaacagaattaaatcttaataaaaaagacgaatgattagttcattaacgtacagttttgaactaaaatgcttaccattccttttaggcacgaacagggtttaaataaagaatgagtcccttccaactaaacgaaagtaaaagtaacagcatcagtataaggcatccctgcatatccgtgttaaagttatcctcacctgccttttattttccactttattcttgacgaaaaagaaaaatgttgtatctttgttatgcatttcataccagaaggcggggaaacctgccaatcctcgtggcaggcatttttatgcctgtccacgttcatatctatatggcggttccgtacccccgtgtagaatgttaatgcatctactgccttctggtgaaatgcaacgggaaaggcggaaccgctcttattattttagaaaatcttcgcctaccacacactcataatcacttattatggaaacagaacaagttgccgttcaaccaacggtgggaggtatcacacaagctccccaaaatgtatttattgttaatgacagagaattaaaggacttctacctcaaattcgccctcttcctgaacccggattcctgctccgtaaaccgcactgaattcgaaatgctaaacattctgctgaaagacctgaagaaaattgtgggagcactcacccatctcaccatgcacgcttgggatgatggcatggcagaaatcctgctctcctgcggtgcctactccatacaggacgacttaaacaaaaaaacgcgtatgcaaatgaacgcatcgatggggaagcatctacagttcctcacccaaatggctatggacagtcctacaatgaagctgctatacagaaacatgaacaagcattatatgcaggtagaaatgttagtcaaacagatggctgcggaaatcgaccggcagaaaaacaaggacggacagcaggaaatactggcatccatctcttaatcggttataatcaaaaagcgccatgacgggcaaaaggtaattcagagacgaatcagtcctttaaagagggggtgttcctcagaaaaatatatcattttctgaaaatacccccttttaaataggggtactttcagaaaaaacatataattttgcgccatcaaccgataaaaagaagacgatttatgtcaaaaatgagattttacgcattacaagaactttccaaccggaagccgctggaagttactgccccttccaacaaactctctgattattatggtagccacgtattcgaccgcaagaagatgcaggagtatcttccgaaggaagcctataaggctgttaccgatgcaatcgaaaaaggtacaccgatcagccgtgaaatagccgacctgattgccaacggcatgaagagctgggccaagtcgctcaacgtcacccactacacacactggtttcagcctctgacagacggaaccgccgaaaagcatgacggctttatcgaattcggcgaagacggcggagtcattgaacgattctccggaaaactgctgattcagcaagaaccggacgcttcttctttccccaatggcggtatccgtaatacattcgaagctcgcggatataccgcatgggacgtttcttctccggcattcgtagtagataccacgctctgtatccctacgatttttatctcttacacaggcgaagcgctggattacaagactccgcttctgaaagcacttgccgccgtagacaaggctgccacggatgtttgccagctattcgacaagaacgtaacacgcgtctttaccaacttaggatgggaacaggaatatttcctcgtagactcctccttatataatgcacgtcccgacctttgtctgaccggacgtaccttgatgggacactcttccgccaaagaccaacagctggaagaccactatttcggctccattcctccacgtgtcaccgcatttatgaaggaactcgaaatcgaatgtcacaaactgggcatccctgccaagacccgtcacaacgaagtagctcccaaccagttcgagctggctcccatcttcgaaaactgcaacctggcaaacgaccacaaccagcttgtcatggacctgatgaagcgtatcgcacgcaagcatcacttcaatgtattgctgcacgaaaaaccatatagcagcgtaaacggctccggcaaacataataactggtcgctctgcaccgacaccggcatcaacctgtttgcccctggaaagaatccgaaaggcaatatgctgttccttactttcctggtaaacgtactgatgatggtatacaagaatcaggacctgctgcgtgcctccatcatgagtgccagcaacagctaccgtctgggagcgaatgaagctcctcccgccatcctctcctgcttcctcggttcacaactctcggcaaccctcgacgaaatcgtacgccaagtaggaaacgaaaagatgacaccggaagaaaagactacgctgaaactgggaatcggacgtatcccggaaatcttgctcgataccaccgaccgcaaccgtacttctcctttcgccttcaccggaaaccgctttgagttccgtgccgccggttcttcttccaactgtgccgccgccatgatcgccatcaacgccgccatggccaaccagttgaacgaattccgcgcatctgtggagaaactgatggaagaaggagtgggcaaagacgaagctatcttccgcctgctgaaagaaaccatcatcgcttccgaagccatccgctttgaaggcgacggttactcagaagaatggagacaggaagctgcccgccgcggactgaccaacatctgccacgtgccggaagcactgatgcactacgtagacaaccagtcgaaatcggtactgatcggtgagcgcatcttcaacgaaaccgaactgaacagccgtctcgaagtagaactggaaaaatacaccatgaaggtacagatcgagggacgcgtattgggcgaccttgccatcaaccacatcgtgccgacggctgtcacctaccagaaccggctattggagaatctttgcaaaatgaaagaaatcttctctcccgaagaatacgaagtattgagcgccgaccgcaaagagctgattcgcgaaatctcacaccgggtgacttccatcaaagtattggtacgcgaaatgaccgaagcccgaaaagttgccaatcacaaagacaactacaaagagagagcattcgaatacgaagaaaaagtacgtccttatcttgataaaatccgcgatcatatcgatcacctggagatggaggtagacgacgaaatatggccgctacccaagtacagggaactcttgttcaccaaataaaaagctcctgaagattgcacgaaagaacctgcttttgtgcaatctttttatagattcgttcattttctcattttttctttctacttttgtgctgtataacacagttttgtagcacccatggtaaaaatgaacatgtcagacatcgatatttcggaaccattatccgatttgttagctcctttgaataacgaacaaagggagtttctgatgaacaattatacaatacagacctacaaaaaaaacgaaaccatctactgcgaaggggagactccctctcatttgatgtgcctcattaccggcaaggtcaaaatcttcaaagatggtgtaggaggtagaagtcagattatccgcatgattaaacagcgggaatactttgcgtaccgtgcatacttcgcaaaggaagacttcgtaactgctgccgctgcttttgaaccttctgttatctgtctcatccccatgactgccattaccacgcttattgctcaaaacaatgatttagccatgttcttcatccgccagctttctatcgatctcggcatttccgacgaacgtaccgtcagcctgacacagaaacatatccgcggacgtctggcagaatcgctaattttcctcaaagaaagctacggtctggaagaagacgggtcgacattgagtatttatctttcccgtgaagacctggcaaatctgtcgaacatgaccacctcgaacgccatccgtaccttatcacagttcgctacggaacgcctgatcaccatcgacggaagaaagatcaaaatcattgaagaagaaaaactcaagaaaataagcaagataggataatacagaccttatacgatcataaaaagtgatctgaaactttaactggaagccgatgttcgtcacatcggcttttttatttctatactattggaacttatcaattaaacaagtacatttgtcctgtcaatatattaataacttaacacaatttcagaccatgaagaaaagtatttcccttcttcttttgtccttacttatgattacccccagttgtcagaagccaaaagaagtgacgaacgagtacaatatcgttccgcaacccaaccagcttgttcccaaagaaggccgcttcgaactgagtaacaaagtccggctggtagttccgtccgatgctccggaagttaaaaaggtagccgacggctttgccgaacaactgaaacagactgccggaatctctctgaaagaagccgaaagcgtggatggaaagcctgctatcagtttcgtactacaagaaggtatgcctaaagaaggctacaaactgtctgtcacccctacccttattacagttacagcttcccagccgaacggatttttctatggtgtacagactatttatcaacttcttcctcccgctgtttacggaaaagaactgaagaagaaagccgactggtctgttccggctgtagagatcgaagacgctccccgctttgtacatcgcggactgatgctggacgtttgccgccattacgccccgatagagtatatctacaagtttatcgacctgttggcaatgaacaagatgaacgttttccactggcatctgacggacgatcagggatggagaatcgaaatcaagaaatatccgaaactgacagagataggttccaaacgtgaaaagacgctggtagactattattatgtgaactatccgcaagtattcgacggaatagaacacggaggatattacacacaggaacagataaaagaagtagtagcttatgctgcaagcaaatatatcaatgtaatccccgaaatagaaatgccggggcatgcattggcggctctggctgcttaccccgaattgtcttgtgattctacacagacatataaagtatcacctacgtggggcgtattcgaacaggtattctgcccgagcgagaccactttcaagttctttgaaggagtcatggatgaggtagtcgaattatttcccagcgaatacattcatatcggaggggacgaatgccccaaaacagcttggaagaacagtgctttctgtcagcagttgattcgtcagttaggcttgaaagatgacgtgactcccagcaaagtggacggagtgaagcacagtaaggaagataaactgcaaagttacttcgttacccgcatggaaaaatacctgaacggtaaaggacgcaatatcatcggttgggacgagattttggaaggcggtctggctccaaacgccaccgtcttgtcatggcgtggcgttgaaggcggattgaacgcggccaaagcaggacacaacgcaatcatggctcccatgccttatgcttatctggacttctatcaggaagatccggaaattgccccgactaccatcggcggatacacaacgctgaagaagacttatagctacaatcctgttccggatgatgccgacgaactggtgaaaaagcatatcatcggtatgcaaggcaacctctggagagaatatatgaagacttccgaccgggtagattatcaggccttcccacgtgcgatggcaatcgcggaaacgggatggacactggatgccaacaaaaactggaagagtttctgcgaacgcatggttaccgaatttgaacgtctggaagtcatggataccaaaccctgcctcaacttcttcgacgtaaacatcaatacgcatgcggatgaaaatggtccgttgatggtattgctggaaacattctacccgaatgcggaaatcagatacaccacagacggcagcgaaccgacttacggttctacactgtatgaacagcctttcgtgcttgaaggaaacatcgacttgaaagctgctgctttcaaagacggcaagatgctgggcaaagttaccaacaagccattgtatggcaatctgctggcaggaaaaccatttaccgtcaattatacaatgggatggacaggcgatattttcggcgacaatgatgtattgggagctgacaagacaactttcggtctgacaaatggaaagagaggtaacaatgcttcttacactccgtggtccagtttcgcaatcgtagaaggtaaagacctggaattcatcgtccatctggacaaaccgacggaagtaagaaaagtggtcttcggctccttgtttaatcctgccatgagaatgctccccgccggaggagttgccgtagaagtatctgctgacggacagcaatatactcagatagccgaaaaagtattgaagcatgattgtccggaaacgggaagaatcgcattcaccgactctatcgaacttgaaccgacacaaaccactttcctgaaagtcaaaatcaagaatggcggtaccttgcgcaatggcatcaatttcgaaaagaacaacggtccggaagtcattcctgccgaattgtggatagacgaaatcgaggcatattaatgcctgtgacataacaaaaaaacggtggacattcagcttattgctcatgtccaccgtttttttattgattcagttcttatctattccatgcaaagcatttcgccttgcttcatctttaaataattccttttgcagagagataacgttctgcttcgatagcagccttacagccacttcctgccgctgtaatagcctgacggtaatgcggatcagccacatctcccgctgcgaatactccgggaactttcgtacgggggctgtcaccatctgtaataatgtaacccacttcgtcagtgtcgatatactctttgaaaatatccgaattcggtttgtgaccgatagccaggaagaaaccgtcgataggcagactgtaacgttcttcgtccgattcgccccaacgcttcacgacattcataccttctacgccgttgtcaccaaacagaccgactacattgtgttcgaaaagtacttcaatcttctcgtgcttctgcacacgttcctgcataatcttcgatgcacgcaggtaaggtttgcgaaccaccagatatactttggatgccagacctgccagatagatcgcttcctcacaggctgtatctccaccgcccaccactgcaacgaccttcttccggtagaagaaaccgtcacaagtagcacaagcgctgactcccattccggcgtatttcttttcgtcttccagtcctaggtatttggccgtagctccggtagagatgatcaatgcttccgcttcaatcaccttatcgccgtcaatcgttatttgataaggagccttgctcaaatctgccgctgtcgcaataccaaaacggacgtctgttccgaaacggctggcttgcgcacgcaaatcttccatcaactgcggaccactgattccttccggataaccggggaagttctccacatccgtagtagtcgtcaactgaccaccgggctgcaatccttcataaagcaccggacaaaggttagcacgtcctgcataaatcgctgccgtatatccggcaggtcctgagcctataatcaggcattttactttttctatttctgccattttattgttatattattgttttattattccaactatctcgtctcttactcaaaagaatattctatcgtaagtctatcacttccgcagtggggtatgccttccggtcgaaagtgaaaacatgatccgcataatccagtccggtctgataagctgtcacggtaatctcattacgcgttttctgaccacgttgctgaagctgaatgtaaaccggttcatacgtactcttcgtcacataaagcgtaatgctttccaactcttgctttttatcattggcagtcagaatcacttcccaaacagctttaccctgatatgtcttcacagttcccaatttataagaaaaccctttctgatacatataaagaaaggtatacggattgatctgctgcaactcttcctgagtaggattgctgacattcacttcatcatttctcaccatgtagctccactgtgttttcccgtcaaaccaagtggtggtctcggaggtcttcagcataaacttctcgcccttcaactggatgataccgttctcccgtccttccagacgaccgtcattgacagccttcaaggtaaaatcggccctcacaccacctgccttcttaaacgcttcggctgtcttttccaaaacagctttagcctgcgactgctgttgttgagcaatcacaggcagtgacagtaaagctattaaaacactaaaaatgtattttctcatttgattaataaacgattgattactgtaaattgttcaaacgcatttcaagatcattctcgtcgatgcagagtacatcacgggccttgcttccctgtgtaggtccgacgattcccgccttttcaagctgatccatgatacgtccggcacgattgtagccgatagcaaatttacgttgaattaacgaagtggaaccttgctgatggatgaccaccaagcgcgccgcatcttcaaacaacgggtcgagacgtcccatatcaatgtcgcccacttcactgccgctgtcttcgctcacatactcgggcaggaagaacggagttggataactctgctgacaggcaataaacttcgtgatctcctccacttccggcgtatcgataaaggcacactgcacacgtaccggatcagcaccttgcaggaagagcatatcccccttaccaatcaggcggtttgcccccggacggtcaagaatcgtgcgggagtccatcatggcggatacacggaacgcaatacgtgccgggaagttcgccttgatcgtacctgtaatgatattcgttgtcggacgctgcgtagcgatgatcatatgaataccgaccgcacgtgccaactgcgcaatacgggcaatcggaagttccacttccttaccggcagtcatgatcaaatctccgaactcgtcgattaccaccacgatatacggcataaacttatgtcccttctccggattgaggcggcggttgataaacttctcattatactccttgacattacgcacatgggccatcttcaagaggtcatagcgtgtatccatttccacacaaacagaattcagcgtttgcactaccttggtcacgtccgttataatcggttcgcctccatcaggaagtttggccagaaaatggttttcaatgacggaataaatgctgaactccaccttcttcgggtcgaccagcacaaatttcagttcagccggatgcttcttatataataaggaggtaatgattgcattcaagccgacagacttaccctgaccggtagcacctgccaccaacacgtgcggcatcttgcaaaggtcgaacataaatacttcgttcgtgatcgtcttacccagtacaatcggcaagtcaaatctggattcctggaacttcttgcttccgatcacgctctgaccggatacaatcttcggattcttgttcggaacttcaataccgatggttcccttacccggtatcggagcaatgatacggataccatccgccgacaagctcagggcgatatcatcctccaagccacgaatcttcgagatacgcacaccctgttcgggagtgatttcataaagagtcaccgtaggacctaccgtagctttgatcgtactgatttcaatgccaaagctgcgcaatgtattaatgatacggtctttattcgcattctgctcgtccatgtcgatcgtcggatcgtcattctcaaaatgcttcatcaagtcgattgtcgggaaacggtaattttccagatccttcatcggattataaggttcttgctccggaccctgatattcttcttcggacgcagctgtctctacctggaatccgggttcatcctcacccggcaattcatcctgagcagcaggaggaaccacatcgcttacggtcggttcaaagaccatagtcaccccttctgcctcatcagcagaaggaagttcgtcgtccggttccggtgcgttgaccggagattcttctttcggctcttctgcctgtatatccatcacgggagcaggaggaggtgtttgcttataagtacgtttcagattgaactccacttcctgcggttgcgaggtcgtgaactcctgtgttccttctgccgcagtctccttttcttcttctttcttctgacgtttgaggaaactcagagcaaaaagtttgcgcaaccagattactgtccgtgcacttatatatataaagaagcagacagccgttatcagcagaatcatccatactccgggaactcccacctgcgaaaccagccatcggcttacattgtaaccgtgcatacctcccagataaatgaaagaatcctgataatgatccatcaaagcgaagccgaagaacacggagaaccacaccaataataatgtacaaccgataaaccatttccacagacggacaatgcgcacccgcatcagcttcaatcctgccaccgccaaaaagacgaggataaagaaagaagatatcccgaagcagtcatttatcagatagctagctagctgtgctccgcgagatccggcatagttttttacattattattaactgccgcaaggtctgccgagttgccgctgtcgataatactttggtcggccgcccccgtaaagaagaaggaagaaaaagccaacaaaagataaacggaaaagatcaccaacatcaatccgagcacaaaatgaacggtttcattcttaaaaattgatacaatctttccgggagaagacggagtgcgttcagcctccttatctattttcttttttgccatgagtctttattctttaaataaattggaatccgtattataagccgcaaaaataataaaaaaataacgagcagtactctcattcaatcctttttcttacctttgcgattcaaatcaatctgattatggaaaaagaaagccaaacgatatttgaaaagaatgtgatcgagttcgtaacggtagccgccgaattttgcgcattcctcgaacgtgccgaacacatgaagcgcaaagcttttgtcgacacgtccttaaaaatacttcccctgctctatctcaaagcatccttgcttccgaagtgtgaaacaatcggagacgaggcacccgaaacgtatgtgacggaggaaatttacgagattctgcgtatcaatctggcagggctgatgggtgaaaaggatgattatctggacgttttcgtacaggatatggtgtacagtgaccagcctatcaaaaagtccgtctcggaagatttggcggatatctatcaggatatcaaagattttattttcgtcttccagctgggactgaacgaaaccatgaacgactcgttggccatctgccaggaaaacttcggtctgctgtggggacagaagctggtgaacactctgcgtgcccttcacgatgtgaaatacaaccagcagaatgagaatgacgaagaggacaacgaagaagagaataacgaactaagcgatgacgactattgttgtgaagaagacggatgccattgtcatgacgacgatgatcacgatcacgaagacggttgtcactgccacgacgacgaatgccactgtcacgaggacggttgccattgtcgtaatgacgaataaacgaaaatgatagtaagaagaagtataaataaagacgaactaaaggaactcccgaaaactgtatttccgggacgaatccatgtgatccagtcggaagcggaaacagaaaaagcggtagcttacctgcaatcccagccgatactaggtatcgacagcgaaacgcgcccatccttcaccaaaggacaaagtcataaagtagcacttctgcagatttcttcgaacgaatgctgtttcctgttccgcctcaacatgacgggacttacccaacctttggtcgacctgctggaaaatccggctgtcatcaaagtaggactgtcgctcaaagacgactttatgatgctgcacaaacgtgcacctttcacccagcagagctgcatcgaactgcaagactatgtacgccagttcggcatacaggacaaaagcctgcaaaagatttatgccatcctgttcaaagaaaagatttccaaatcacaacggctgtccaactgggaagcggacgtgctgagcgacggacagaaacaatatgccgccaccgacgcctgggcttgcctcaacatctacaacctgttgcaggaactgaaacgaaccggcaactacgaggtcgaaagcctccctgtagaagaagaagttgacgcaagtgctcccgccaatcgctgacaaataaccgataaaagactaattaataactgataaaatagcattttaaacaacatgcataaagtatacctcaaacccggcaaagaagagtctttaaaaagatttcacccctggattttctccggagcaatcgctcgtttcgatggagaacccgaagaaggtgaagttgtagaagtatacacttcgaagaaggaatttatagccgaaggacattttcagatcggaagtatcgccgtacgtgtgctttctttccgtcaggaacccatcgaccacgatttctggaaacgtaaactgcaaatcgcctatgatatgcgttgtggaatcggtatcgcagtcaatcccaccaatgacacctatcgtctcgtgcacggtgagggagacaatctgcccggactggtcatcgacatctatgcccggactgccgtcatgcaggcgcactctgcaggaatgcatgtagaccgcatgagtatcgccgaagccctgtcggaagtaatgggtgacaagattgaaaatatctattataaatcggagactacgctgcccttcaaggcagaccttttccccgaaaacggtttccttaaaggaggaagcagcgataatatcgcacaggaatacggtctgaagttccatgtagactggctgaaaggtcaaaagacgggatttttcgtagaccagcgcgaaaaccgttcgctactggagcattattcaaaagaccgttcggtactgaatatgttctgctacaccggcggtttctccttctacgccatgcgcggaggtgcaaagctggtacattccgttgacagctctgccaaagcaatcgatctgactaacaaaaacgtagagctgaacttccccggcgatgcccgccacgaggcttttgccgaagatgctttcaaataccttgaccgcatgggcgaccaatatgatttgattatcctcgacccgcctgcatttgccaagcataaggatgctttgcggaatgccctgcaaggttatcggaaactgaatgccaaagcattcgaaaagatcaaaccgggcggcatcctgtttactttctcctgctcgcaggtggtaaccaaggataatttccgcacggctgtgtttaccgctgccgccatgtcaggacgtagtgtacgtatcctgcaccagcttacccagcctgccgaccatccggtaaatatataccatcccgaaggagaatacctgaaaggactggtactctatgtagagtaatatatgtcataaacaccatgaacttgcataaataaggggtgagtaacagaaaaataacagcttcaaagttaattagagttaacaaacagaagtttttcggcaaaacattatgttctataacataaaaccccttatatttgcactgtgtttttcatggtattagatttaaggttaataaagattggctgtctgggatagatagccttctttttttatatacctatccaccctctttttagcagcaattcttcaccattcttcgcatttatggcttttttatcccctttttatcgattaacttgtccacccaatcaacgaaaatattatatttgcatctattattaacgtaaaaagagaaacacaaattagaaaagtcatgagtataaaagttcgtttgatcattatgaacttcctgcaattctttgtatgggggtcatggttaatttcactagggggttacatgggcagagaactccacttcgaaggagggcagatcggtgccatcttcgccaccatgggtattgcctctttagttatgcccggcatcattggtattatcgccgataaatggttcaatgccgaacgtttatacggactttgccacatcgcaggggcagcttgtcttttctatgcctctactgccacgagctatgaccagatgtattgggcaatgctgctcaatttattggtatatatgcctaccctgtcgctggccaataccgtttcatacaatgcactggaacaatataaatgcgatctgatcaaggacttccctcctatccgtgtatggggaacaatcggtttcatctgcgccatgtgggcggtagaccttaccggattcaaaaattccagcgcacaactctatgtaggcggcgcatccgcactcttgctggggttatactctttcaccctgccggcatgcaagccatccaagacagaaaagaaaacattgctttcttccttcggactggatgcattcgtattattcaaaagaaagaaaatggctattttcttcctgttctccatgcttttaggagcagcattgcagatcactaacacgtatggtgaccttttcctcggcagcttcgccagtattccggagtttgcagattctttcggagtgaaacattcggtgatcctgctgtctatctcgcaaatgtctgaaacattatttattctcgctataccattcttcctgagacatttcggcatcaagcaagtgatgctgatcagtatgttcgcctgggtattccggttcggactgttcggcttcggagatccgggttccggtctgtggatgctgattctttccatgatcgtgtatggtatggcgttcgacttcttcaacatttcaggttcgttgtttgttgaacaagaaaccagttcctccatccgtgccagtgcccaggggttgttctttatgatgaccaacgggttgggtgccatcatcggaggatatgccagcggtgctgtcgtagacgctttctcagtatatgctgatggcaaactggtgagccgtgaatggccggacatctggtttatctttgcggcgtacgcactggtgatcggcatcctgtttgctctggtattcaagtacaaacaccaacgagagagtaaagtaaattaagtaaaaaagaacaatggacaaaaaggtagaattacaagttttaaatatcacaaatagccaagcgcaagtaggcgcctttgccatgctgttgggtgaagtggacggtgaacggcaactgcctatcatcatcggtcccgccgaagcccaagcaaccgccctgtatctgaaggggatcaagactccccgccctctgacacacgatctgttcatgaccactctcggcgtgttgggagccagtttgctccgcgtactgatttacaaggcgaaggacggtattttctactcctacatttaccttaaaagagacgaagaaattatacgtatcgatacacgcacctcggatgctgtcgctttggcggtccgtgccgaatgtccgatcctcatttatgaatccattctggaacaggaatgccttcggatatcgaacgaggaaagaagacatccggaagagtctgacgacgaaaacgatgaagaagaatcggaagacgaaaagaagcgggatctgcctcgcaacgttacttcgatgtcactcgaagaagcattggagcaggcaatcaaagacgagaattacgaactggctgccaagatacgcgaccggatcaattcaagaaatcaaaaccagtaaccaattatgcacgtattttatactcccgatatacagaaaaacaacgaacttccggaagaggaagcacagcactgtacccgcgtcctgcggttgggtatcggagacgaaatcactcttacggacggtaagggacatttctataaagcagaaatcacggttgcaaccaacaagcgttgccttgtaaccatcaaagaaacaatctttcaggaaccgctctggccgtgtcatctgcacattgccatggcgccgaccaaaaatatggaccgcaatgaatggtttgccgagaaagctacggaaatcggatttgacgaactgacttttctcaactgccgtttttccgaacgcaaggtgattaaagccgaacggatcgaaaagattctgatatcagccatcaagcaatctcttaaggctcgcctgccgaaactcaacgaaatgacggacttcgacaagttcatcgcacaagagtttcaaggacagaaatttattgctcactgttacgaaggcgaaaagcctcagctgaaaaatgtgttgaaagccggagaagatgctctcgttctgatcggtcccgaaggagacttcagcgaagaggaagtgaagaaagccatcgaacgcggattcactcccatcagcctgggtaaatcacggcttcggacagagacagcggcactggtggcttgccacacaatgaacttattgaaccaataataacttttaaatagtatgagtatggcaaagaaaatgatctcacggctctcggtactggcagtactgattgtgtttctggcagcatgttccaaacaaacggaatatacgaacgtaataccggcagacgctacggctgttgcctctattgatttgaaatcactggccaacaaagctggaatgaacgacaaagaaaatgaagctgctaaacagaaactgctggaagcaatgaagagcgggatgaatgccgccactttccaacagttggagaaggtgatcaacaccccgggagcatccggtctggatccggaagcgccgatctatatctttagctctccgcagatttccggtggtgcattcgttgccaaagtcagcaatgaagatgacttgcacgcctcccttgacgtgatggcaaaagaacaaatctgccagccggtcagcgaagcggacggatatagcttcactaccctgaacggaaacttgcttgctttcaatgaaaccactgcaatcattatctctgccgacagagcttctcagacagaagcagccaaagaagccatcaccaaactgatgaaacagacggccgacaacagcattgcgaaatccggagctttccagaaaatagccaagcaaaagaatgatatcaacttcttcgcctccatgtcagcaatcccttctacttacagaagccagatcagcatgggacttccttctgaaatcaaaccggaagacattaccatcctgggcggactgaacttcgaaaaaggcaagatcgccctcaaaacagaaaattacacggagaacgacgccgtcaaagctcttctgaaaaaacaaatggaatcattcggaaagacaagcggcacattcgtgaaatacttcccggcatctacgctgatgttcatcaatatgggcgtaaaaggagaaggactttacaatctgctgagcgagaataaggaattccgcagcaccgtgtctatcgccaaagcggatgaagtaaaagaactgttcagctcattcaacggcgatatctctgccggactgatcaatgtaaccatgaacagcgcccctactttccttgcttatgctgatgtaaagaatggaaatgctcttgaagctctttacaagaacaaacaggcactgggcatgagaaaaggagaagacatcatggaactgggcaaagacgagtatgtctacaaaacaagaggcatgaacgtattcttcggcatcaaggacaaacagatgtacgccaccaatgacgaactactctacaagagcattggcaaagcggttgacaaatcgatcaaagacgctccttacgcagcagatatgaaaggcaagaccgtatttatggccatcaatgctgaagccatactggatttaccggtcgtaaagatgctggtaggtttcggaggcaaggagttcaagacttattctgatctcgcttccaaagtttcttatttatccgtaagttcggaaggagaaacaagcgaaacagacctttgcctgaaagacaaagatgtcaatgccctcaaacaaatcgtagattttgccaagcaattcgccggcatgtaattcgtaaatgaacggcatgaatagtattcacttacagcaaacacttccccaagtgtttgctgaccgtaattcggtgacctctgacgtatggcatcaggaccttatcttccggaaaggagaaatgtatctgatagaagccgcctcaggcaccggaaaatcatcgttgtgcagctatctttacggctatcgcaacgactatcaaggaattatcaatttcgatgaaaccaatatcaaagcatattccgtgaaacaatgggtagacctgagaaagcattcactgagtatgctttttcaagacttgcgtatcttcaccgaacttacagcgctagaaaacgtacaactgaagaataaccttaccggacacaaaaagaaaaaagagattcttgcattgttcgaaaagctgggtatctcagataagctgaacgtgaaagccggaaaactttctttcggccaacaacaacgggtcgcttttatccgtgcattctgccagccgttcgacttcctgtttctggacgaacctatcagccatctggatgatgaaaacagccgcatcatgggagaaatcatcatcgacgaagccgggaaacaaggtgccggagtcattgccacgtccattggcaaacatatcgaactgccatacaagaaggtgctccaactataacagaatcagcgtcatccgcgcctaaaaatataaaaatacaaaataatgaatacccttgtctggaaacttctccgccaacatatcagtatcggtcagctagccggtttctttttagccaacctgttcggcatgatgattgtattgctcagcgtacagttttataaggatgtcatccccgtattcaccgaaggagacagctttatgaaaaaagacttcatcatagcaaccaagaaaatcagtacgctcgggtcttttgccggaaaaagcaatacgttctctcccgatgacatcgccgatctgaaaaaacagtcgtttaccaaaacgataggagctttcaccccttctcaattcaaagtttcggcaggattgggaatgcaggaagcaggtattcatctctctacggatatgttcttcgagtcagttcccgatgaatttgtagatatcaaactcgacaaatggcacttcgacgaagaaacacataccattcccatcattatcccacgcaattatctgaatctgtataacttcggtttcgctcaaagccgcagtctgcctaagttgtcagaaggactgatgggacttattcagatggacatcatgatgcggggcaacggacgggtagaacaatacaagggaaacatcgtcggtttttccaaccgtctgaatacgattctcgttccgcagtctttcatgaactgggcaaacaagaacttcgcccccgacgcggaggcacaacctgcccgactgatcatcgaggtcagcaatcccgccgactcttcgattgccagctactttcaaaagaaaggctacgagacggaagacgggaaactggatgccggaaagactacttatttccttcgccttatcgtaggcattgtgctgggagtaggtttattcatcagcatcctgtcattctatatcctgatgctcagcatattcttactgctccaaaagaatacgaccaaactcgaaagcctgcttctgataggctacagccccaacagggtggcactaccttatcagatactgaccgtaggactgaacatcatcgtactgattttatctgtcggattgatatgctggctgcgcagctattacatagacagtatcagacttctcttcccgcaactggaaaccggttcgttatgggcagctgtcagtatgggtattcttttattcctcatcgtatcagtcattaatatactggctgtgaagcgaaaagttctttctatctggatgcataaaagttaaaaacacaatatatgaaaaacaccactactcttcaaagtaaaagaagtattacagtactcttgggagtccttctatatttctcatcgctatctgcacagaccatgcaagatacgattatcgccaacttcagtctgatggaaagaattcctaaagaaaagttgtatctccatctggacaaacctttctacggagccggagaaaagatatggttcaaaggttatctggtgaacgccaccacccatcaggacaattcacaaagtaattttatcattacggaactgatcaaccgttccgactccattgtggaacgaaagaaaatccgcagagattctctcggattccacaacgccttcaccctccctgccacccttccggcaggcgattactacctgcgggggtacagcaactggatgctgaatgaagaccccgactttttcttttcgcgcaatatcaagataggaaactctatcgacaataccatcgtttcgagcatcgagtatcagcaagaagacgatacacattacactgccaaaatcaaatttacgagcaacgtacaggctgttttcgaaaatacaacgatcaaatacctgtaccttgagaatggtaagataaaaaacaaaggcaaaaaaaagacggacgaaaacggctggatctccatttccctgcccgatttaaaatctccggcagcacgcagaatagaagtcgaatttgacgatccgcaatatatctataaacggacattctatctgccggtgttcaccaatgatttcgatgtgaagtttttccccgaaggcggtgccctgctcagcattccccatcagaatgtcgctttcaaagtgcagggagcagacggcttttctaaagaagtcgaaggtttcttgttcaactccaaaggagacacgcttaccaatttccggtcggaacacaacgggatgggtatctttacgatgaatcctgtcgataatgagacttattatgttacggcaagaaccaatgacagtattaccaagcgatttgaccttcctgccatagaaccgaaaggaatctccatcgccatgtcgcactataaacaggaaattcgctacgaaatccaaaagacagaaacgaccgaatggcctcagaaactattcctgcttgcacatacccgtggcaaactggccattttacaacccatcaatccggaaaggactttcggaaagatgaacgatagtctgtttacggaagggatcactcactttatgctgatcgatcagcaagggaatgcgctcagtgaacggttggttttcgtaccggatcataagccgaatcaatggcaaatcactgcggatcagcctacttacggaaaaagagagaaggtatctttgcagatcgctgccaaagacaacgaaggtaacccggtagaaggaaccttctctgtcagcatcaccgaccggaaaagtattcaacccgactcactcgccgacaatatcctgtccaatctcctgctaacttcggatctgaaaggatatgtggaagaccccgcatactattttctgaatcaggacgcccggacgctccgttccatcgactatctgatgatgacacatggctggcgcaggcataaaattgaaaatgttctccgcactccttcgctgaatttcacaaattatatagaaaaaggacaaaccatcagcggacgaatcatgggattcttcggagcaaacgtaaagaaaggtcccatctgtgtactggctcccaaatacaatatcatagccaccaccgagacagacgagaaaggccagttcatcgtcaacacctcattcagagacagcacgacattccttgttcaggcacgcaccaagaaaggatttgccggtgtagatattctaatggaccctccccagtacccggtcgctacacataaagccccttattttaacggagcagctacctttatggaagattatctgatgaatacccgtgaccagtattacatggaagggggaatgcgtgtgtacaatctgaaagaagtgacagttacagcgaagcgggaacgtccgagctcaaaaagtatttatacgggtggtatcaacacctatactgtagaagaagacagactgcaaggatacggtcagacagcttttgatgcagccagcagactacccagcgttacgatcacgaacggaagtgagatacatatccgcaacaattccgaaccggcaattattgttatcgatgatattgtgtatgaagatgcttccgatattttgaaggatatccaagtcagtgatatgtccagtatcagtctgcttcgaggagcagatgccgtcatactgggtccccgtgcttccggaggtgccgttgtcatcactctgaaagaccctagaaatcttccggccagaccagcgcagggaattatcacttatacgccgctgggatacagtgagtccgtagaattctatcaccccacttatgatactcccgagaagaagaacgctcagcgttcggacttccggagtaccgtttactggaatccggaattacggttagacgccgaaggcaaagcgaccatcgaatactatacaccggacagcacagctcccgaagatatcattatcgagggtgtggacaagaatggaaaggtatgtcgcttcctacagaccattaataagtagcttttctcaactcttcttcaaacttttgtgtagttcaaatttgagttccgcttcctattaaataatcagataaaagcatccgaataacccattgggtcaaaattattttgtatttttgccgtcattaaagaataaaactatgccagactatgatttaatcaccatattagggccaactgcctcagggaaaactccttttgctgcagcattagcccatgaactgaatacagaaattatcagtgccgactcccgtcagatctatcggggaatggatcttggtacgggcaaggacttggcagattacacagtcgacggacatccaatcccctaccatctgattgatattgccgatcccggatataaatacaatgttttcgaatatcagcgggatttcctgatttcttacgaagctatcaaacaaaaaggctgtctgcccgttttatgtggagggacaggtatgtatctggaatcggtactgaaaggctataaactgatgccggtaccggaaaatccggaattacgtgcccgtctggctaatcactctctcgaagaactgaccgaaatcctggagcaatataaaacattgcacaactctacggatgtggataccgtgaaacgtgcaatccgcgcgatagaaattgaggagtattatgccgtgcatccggttcccgaacgggagtttccgaagttgaacagcctcatcatcggggtagatatcgatcgggaactgcgtcgcgagaagatcacccgacggttgaaacaacggctggacgaaggaatggtggacgaagtaaggcgattgacagaacaaggcatttcaccggacgacttgatttattacggactggaatacaaattcctgacgttatacgtcataggcaaactgacttacgaagaaatgttcactgagctggagacagctatccaccagttcgccaaacgtcagatgacctggttccgcggcatggagcgaaggggatttaccatccactgggtcagtgcagagctgcctatggaagaaaagatagcctttgtgatagaaaaactgcgagggaattagtatctttgtcagtcatttacgaatggtctgtgaaagataaagaatgcgattgttaatacagttaggatagaaatacggttatgagtgtagaacctggaaaatggggagtgatctacaaccccaaagcaggtacccgaaaggtacagaaacgatggaaagaaatcaaggagtacatggacagcaaaggtgtcaactatgactatgtacaatccgaaggtttcggttcggtagaacgtcttgccaaaattctggcgaacaacggctatcgcaccattgtcatcgtaggtggcgacggtgcgctgaacgatgccatcaacggtatcatgctctctgatgccgaagacaaggaaaacatcgccctcggcatgatcccgaacggtatcggaaacgactttgccagatactggggactcagcaccgaatacaaacctgccgtagactgtatcatcaaccaccgtctcaagaaaatagacgtaggcttctgcaacttctacgacggcaaggaacaccaacgccgttatttcctcaacgcagtcaacatcggactaggcgcaaggattgtgaaaatcaccgaccagaccaaacgcttctggggggtgaaattcctgtcgtacgttgccgccctcttctcgctgatattcgaacgcaaactataccggatgcaccttcgtatcaatgacgaacacatccgcggacgcatcatgaccgtatgtgtaggaagcgcctggggatggggacagactccgagtgccgtaccctacaacggctggctggatgtatccgtcatctaccgtccagaattcctgcaaatcatttcgggattgtggatgctgattcagggaagaatcctgaaccataagatggtgaaaagctaccggacaagaaaagtgaaagtgctccgcgcacaaaatgcttccgtcgatctggacggtcgtctgctggcaagacatttcccgttggagataggtgtattatcagaaaagactactttaatcattccgaattagccaacagaaccgggcttctgacgaaaagcagcccctcactcatgaaactataaataagtaattagtaacttgtaattaataaaatgatcgaacttaagaacaatcctgccggcaatttctttctgctggccggtccatgtgtaatagaaggtgaagagatggcaatgcgcatcgctgagcgcgtggtcggaatcactgaaaaattacagattccttatgtattcaaaggttcttaccgcaaggcaaaccgttcgcgtctggattcattcacaggtatcggtgacgagaaagcactcaaggtactgaaaaaggtacatgatactttcggagttcccacggtgacggatatccattcggccgacgaggctgagatggctgccgaatatgcagacattctccagattccggctttcctttgccgtcagacggatttgctggttgccgctgccaaaaccggaagggcgattaacatcaagaaaggacagttcctctctccgctcgcgatgcagtttgccgcagataaagtggtggaagcaggcaacaagaacgtgatgctgaccgaacgcggaacaaccttcggttatcaggaccttgtagtagactaccgggggattccggaaatgcaaacgtttggttatccggtcatactggatgtcacccattcattgcagcaacccaaccagaccagcggagtgaccggtggtatgccccaactgatcgaaaccgtagccaaagccggcatcgccgtaggagccgacggtatctttatcgaaacacacgaaaaccccgccgtagccaagagcgacggagcaaacatgttgaagctggaccttctggaagaactattaaccaaattagtcagaatacgggaagctattaaataactcttttttctgcccgtttgtgattatgcacaaaagaatacgacagatatttcagacaacttttttataaactaaatagaacatgaaacatttattacgtggattttttattgcagttctctttatatgctgcaacttccaactcgtgcttgcacaacccatgcaaacactgcctgtggacaagaatgtccgcataggtaaacttgacaacgggcttacttattacatccgacacaatgcacttccagaaaaacgcgtcgaattccacattgcacagaaagtgggttccatccttgaagaaccgcaacagcgcggtctggctcacttccttgagcatatggccttcaatgggacaaagaacttcccgggtgatgaaaccggactgggcatcgtgccttggtgtgaaaccaaaggtatcaagttcggaacaaacctgaatgcgtacaccagtatcgacaaaacagtataccgaatcagcaacgtacctaccgacaatgtaagtgtagtagactcctgtctgctgatcctgcacgactggtcaagcgccatcaaccttgccgacaaggaaatcgacaaagaacgtggtgtgatccgtgaagaatggagaagccgcaacagtggtatgcagcgcatcatgaccagcgctctgcctgtcatgtatccggactccaaatatgcagactgtatgccgatcggaagcctcgacgtgatcaacaacttcccttatcaggacatccgcgactactatgcgaaatggtaccgtccggacctgcaaggtatcatgatcgtcggcgacatcaatgtagacgaaatggaagcaaaactgaaaaaggtatttgcagacataaaagctccggtaaatccggctgaacgtatctactatccggtagccgacaatcaggaaccgcaaatcttcatcggtacggacaaggaaatcgaaactccttccatcagcttcttcttcaagagcgaagctttcccggattcactgaagaatacaatcaactattacggcattcaatatatgctgagcatgggtgttacgatgctgaacagccgcctggcagaaatcagccagcaggcaaatcctcctttcaccggtgcaagcgcaggttatggcgacttcttcgtagccaagactaaaaatgctttcggagtagatgccagcagcaaaatcgatggtatcgaactggctatgaaaaccattctcgaagaaactgaacgcgcacgccgcttcggattcaccgaaactgaatatgaccgtgcccgtgccaactatctgcaacgcgtagaatctgcttacaacgaacgcgaaaagatgaaaaacgacacttatgtcaacgaatatatcagccacttcctcgacaatgaaccgatgccgggcattgaatacgaatatgctatgatgaatcagctggctccgaacattccggtagcagcgattaatcaggtgatgcaacagctgatcactgacaacaatcaggtagtactgttggcaggtccggagaaggaaggtttgaaatacccgacaaaagaagaaatcgcagctctgctgaaacagatgaagtctttcgacctgaagccttacgaagacaaggtatctaacgaaccattactgaaagaagaaccgaaaggcggaaagatcgtttctgaaaaagccggagatatttatggcacaacgaaactggttctgtccaacggtgtgaaagtgtacatcaaaactactgactacaaagctgaccaaatcctgatgaagggtaccagcctcggtggtaccagccagttcgcagacaaagaaattctgaatatctctcagatcaacggtgttgcactggtaggcggtatcggtaacttcaacaaagtagacctcggcaaagcacttgcaggcaaacgcgcttctgtaggagccggtgtcagcgctacaacagaaacggtttccggtagctgttctccgaaggactttgaaacaatgatgcaacttacttatctgactttcactgctccccgcaaggacaacgaagcattcgagtcttacaagaaccgcatgaaagcagaattgcagaatgccgacgctaatccgatgactgcattcagtgataccatttcttatgcactgtatggcaatcacccacgttctttcagcatgaaagaaaatatggtggacaagatcgactatgaccgtgtaatggaaatgtacaaagaccgtttcaaagatgcaagcgactttacattctacttcgtaggaaacatcgatatcgagaagatgaaaccgatgattgccaaatatctgggcagtctgccatctatcaaccgtaaagagactttcaaagatacgaagatggaaatccgcaagggtcaatacaagaacgagtttgccaagaaacaggaaactccgatggccagcatcttattcctgttcaacggtacttgcaaatatgacttacgcaacaaccttaccctgagcatccttgatcaggcattggatatggtatacaccgaagaaatccgtgagaaagaaggcggcacttatggcgtaaactgtagcggaagccttagcagatatccgaaagaacaactcgttcttcagattgtattccagactgacccggccaagaaagacaagctgtcgggcatcgtcatcgaacagttggaaaaaatggctaaagaaggtccgtctgccgaacatatgcagaagatcaaagagtatatgctgaaaaaatacaaagatgctcaaaaggaaaacagctactggctgggcaatctggatgagtatttctacacaggtatcgattatacaaaagactatgagacgttggtcaacagtatcacagcaaaagatgtacaggaattccttgccaagctgatgaaacagaacaacgaaatccaagttatcatgaccatacctgaagaagaagctaaataaacctttatagcataccaacagtatgatgatattcaacgaattacgcaaacatggacggcttgcttccaaaaggcatccgatgtatgaaaagaacaaagttgccaaaatattcggatatatcggggttgccttctgggcaggatacctgatattcttcggtacaacgtttgcattcggctttgcagatatggttcccaaccgggaaccgtatcatgtaatgaatgccgttgccctgatctttattctggcacttgacttcctgctgcgtattccgttccaaaaaacaccgacgcaggaggtaaagccttacctcctgttgccggttaaacgaaatcggatcatcgatttcctgcttatccgttcgggacttagtctgttcaacctgttctggttgtttatgttcgtcccctttgccttcattaccattaccaaatatttcggtatttcaggtgtactcacctatctcataggcatctggcttttgatcgttgccaacaattactggtacctgttatgtcgcacactaatcaatgaacgtatttggtgggtgctgctccctgtcgctttctacggtgggctgggctgccttgcctttattcccgaagacagtcccctgttctacttctttatggacctgggagacggatatatcaacgggaatattctctgtttcctcggtaccatccttgtcatagccattttatggctgattaaccgcaaaatcatgtccggcctcatctacgctgaattggcaaaagtagatgacacccgcatcaagcatgtttcagaatacaaattcttcgagcgatacggagaagttggtgaatatatgcggttggaattaaaaatgcttttgcgcaaccggcgttgcaaaggtgcattgcgcaatgttctccttgtagtcatcgccttctcctgcatacttagcttttcaagcctttatgacacgagtaccatgactacctttatctgtgtttataactttgccgtattcggcatgatcatcctttcgcagctcatgtctttcgaaggcaattacatcgacggactaatgtcccgcaaagaatccatcatgagtctgctgaaagcaaaatattatatctatactatcggcgaaatcgtcccatttgttttgatgattcccgccattgtaatggataaagttcccttactgggtatctttgcctggttcttctacaccaccggttttatctatttctgtttcttccaactggctgtttacaataagcagaccgtagcactgaacgaaaaagtgacaagccgccagaccaacagcgccatacaaatggttgtcaacttcggagctttcggtatcccgttgatcctgtattctgtgttgaacgcgtttctgggtgaaacggccgcctactctatcctgctcgccatcgggcttggatttacactgacttctccgctttggatcagaaatgtatataagcgtttcatgaaacggagatacgagaatatggaaggcttcagagacagccgccaataagagatttacgattgaaccgattaatcatttacgataaaaaataccaagacaatgataagcatcaataatcttcaaaagaatttcggcaaaaagatggccgtgaacatagatcactatgaaatcaatcaaggcgatatgctcggattggtaggaaacaacggtgccggtaaaacaacacttttccggttgatgctcgacttactgaaagcggataatgggaatgtcgtcatcaacgacattgacgtcagtcaaagtgaagactggaaaaacttcacaggtgctttcattgacgatggatttctgatagactaccttactccggaagaatatttttactttatcgggaaaatgtacggactgaaaaaggaagaggtggacgaacgcctgctgccgttcgaacgtctaatgagcggagaagtgatcggacaaaagaaactgatccgtaactactcagccggtaataaacagaaaatcggcatcatctccgctatgcttcattatccgcagttgctgatactcgacgagccgttcaatttcctcgaccccagttcgcaatccattatcaaacatatgctcaaaaagtacagcgaagagcataatgcaactgtaatcatttccagccacaatctgaatcatacgatagatgtatgtccacgtattgccctgctggagaatggtgtcatcatccgggatattatcaatgagaataattctgctgaaaaggagctggaagactactttaatgtagaagaataaagttacttataattttacaatatacgaaaagaaagatagccgatgagagtgaacttcaaacttatcttcatactgacaggactgatccttgtccttagttcctgccgcacgtctgctccccgtctggattaccaggcactggcacgcgcctccatcctgctgggcgtggacatccatatggaagataaccacaagctctatctggaatcggccgaatggataggtgcaccttatcgtggaggcggcgattcaaaacgcggcaccgactgttcgggacttacctaccagatataccggaaagtataccgcactcaggttccgcgaaataccgaagacctgagaaaagaaagtaccaaagtcgccaaacggaatttgcgagaaggcgatctggtattcttcagcagcagtcgttccggcaaaaaggtagctcacgtaggtatctatctcaaaaatgggaaattcattcatgccagtaccagcaaaggagtgattgtcagtcgtctgagcgaagactattacaccagacactggatatccggaggaagaatacgctgattatcaacttaaaaacatatagaatcatgaaatcgtttattggagcagtcatatttatctgcgtagcgttaagcgcaaacgcacagcttttatggaaagtatctggtaatggacttagcagcccttcatacattatggggactcaccatctcgctccgttgagtgtcaaagacggcattgccggactacagaaagcgatggatgaaacacaacaggtatatggagaactgaaaatgtcggatatccagtctccggccaccatccagaagatgcagaaaatgatgatgatcgaaagcgatacgactctgactactctcctctcaccggaagattacgaaaccgctaataaattctgcaaggagaacctgatgatggacctcaacatggcacccaaaatcaaaccggctttcttactgaacaacatagcagtagtggcgtacatcaagcacatcggaaactataatccgcaagaacagctcgatacttatttccagactcaggcaacgcagaaaggaaaaaaagtggatggactggaaactccggatttccagtttaacctgctatacaacggcatttccctgcaacgtcaggcccaactgctcatgtgtaccctcaataacatcgacaaagaggtggaaagcctcaaaagactgacagatgcctacatgaaacaggatttggaaaccatgctgaaaatcaacgaagagcgcaaaggaaatcaatgtgatgcacttcccgcagaagaaaacgccctaatttacgaccgcaataaaacatgggcacagaaactaccggctatcatgaaagccgctcctacctttgttgcagtcggcgctttgcacctgccgggtgataaaggcttattaaacttactgaaaaaacagggatatacagtagaagcagtaaaatgatgaattataaaacttatttattcgatttcgactatacactagccgattcatcacggggtatcgttacttgtttcagaaatgtacttaatcgtcaccaatatacgaatgtcaccgacgaagcgatcaaacgtaccattggtaaaacactggaagaatctttcagcatactgaccggagtcaccgactgggaacagctcaccgcttttcgacaagagtacagactggaagcggatgttcacatgaacgtgaatacccgcctttttcctgatacactctctactctgaaagaactaaaagaacgaggtgcccgcatcggcattatctctactaaataccgtttccgtatacttagttttctggatgagtatctgccggaaaactttctcgacatagtggtaggcggagaagatgtacaagctgccaagccttcaccggaaggagtaaaattcgctctcgaacacttgggcagtactccgcaagaaaccttatacatcggagacagtactgtggatgccgaaacagcacaaaatgcgggagtagactttgcaggtgtccttaatggaatgactaccgctgacgaactcagagcatatccgcaccggtttattatggagaacttatccggtttgctacaagtctgaacatcgttctgttacaacgaatataaaacacatataactatgaaacgacacttattttttatatacatagccttaattttatgtcattgttctattattcaggcacaaacaaaagctacgatagtagcagctgatcctgatggttttctttgggcaagctccggaggtgagtttttcttccctgttcagaatgtcactaccaaagactggcaagtggaagtgaaagaagcacaaaactggatacaagtagaaaagaaagacacgctcggttttttaataacgatacagcccaatgaaaccgatatagacagatatgcaaccatcagactcttttctgttgagaaagaagaattactaaagtttgcccaactgggagacaaagaaatcatagcaggacttgcatttgattacagagaacagactcaatggatagatgcttcttctaaatttacccggttatggagtgctaaagttaattcagaagcagatagctgggcatatgctacccggcacggagatgatgggatcatgctcaaccttgataaaaatgagcagcgtaccaaacgtaccttaaaattaataatacatgatgcggacaaagtgttggctgccttactggtaaaccaataccctgatccgctaccattatcaacgtatggctatagtgtaggcgacaaagcttccataatcacccttgacgcaggcgtaaaagacagcctgatatttcagcttcccgactggattcagatacattccaaacaagaaactgataacggcatccgctaccaatttgcaatagaaaacaatccaatggacatagcgcgttacgattcgattcgtatacgcacagagtcggaaacaggacaaagtgaaatagctatttcgcaatacggacactcactatacacaccagtcggtgtagaagctttatgcgacactttgatcacgatagcaagtggagaggcttcttccttccaggaaggagaaggggtcgaacggtcattcgacggagatttttccactctgtatcattcttcttatcactcaccggaatatgattcaccggaatatttccccatatcattgacttacaagtttcaaaagcctgaaacagtggattatttggaatattatccccgtacagatggcggcaccaatggtatatttcaggaaatcgaggtatggacgcaagtagccggagaaaaagacttccgtttgacaacaagtgcgaattttaacggaagcactcttatagaacgaatcgaattcccgcatacgcaaaaaaatataatagcagtaaagttagttgtaaagtcaggaatgggtgccggctgcggttttgccagttgtgctgaaatgagattctaccgaaaagcgaacttcggctttaactatacggatatatttaccgattctacctgctatgcactgaaaccaggtgttgcggaacatgatattgacagagtgtgccgtcagcctttcttccataatctggccatgcacctgctaaacggcgattatcctaacgaattccgtgtacaaaactacaaagcctgggaaactccagacgtacaggcacaaaagaacggaacaatgcctttcagtttatacgacaatccgaccggtatcgctgctgtgaaaggagaaccattggtagtattcgtggggcatgaatcacccaaagccaaaagattggctatggtgattcaaaacttgaatctgaagtctgataatgacggctatggtggtccatcgtattttttacacaaaggtctcaacgtactatatccgaatagttcgggattagtctaccttctttatcagtccgacacaccggaatcaacatcccctgtacgcgtccacttcgctaccggcagagtgaacggttatttcgacgcgactaagcatatatctcccgacggaacttccagatggagcgaattactggcacgtgccggtgataaatatttcgatgtattaagtaatcatgtccactttacattccgtgccgaggacttccgcagatatgtaccggatgtcaacaagctgctggcagcttatgacacactggtatgtcatgaacaggaatttgcaggtctgaaaaaatacaatcgctggatgaataaccgactctacatacatacgacatatcgggaaatgctttatgctactccataccatatcggtttccaggaatcacaacttcctctgctactgtgccccgacagcctgaaaggagcacattgttgggggcctgcccatgaattgggccatgtattacaagtttctccatcaatgaaatggactggcatgacagaagtcactaataacattcaaagcatggaaatacaacgattgtggggtaatccttctcgcctgcatacggaatcacgcagcacgaatgggtataatgacatttatgaacaggcaatgaacgtagcttttgtacagaaacgtccttttgcatacctcttcgactggttcgaccaattagtacctttctggcaactgcgactgtacgtgatggacatctgcggcaaatcggatttctataaagacgtctatgaagccagccgcctgctaaacgcccaaggtacccatctcacaagcggtcaactccagttagaattcgtatataacagctgcgtggcagcaggcatggaccttcgcccgttttttgaaaaatggggctggcttcaagcaagcgaacgtatatacgacgattactacggaaaagatacaattacagtaaatccggcagatatagaacagctgaatgcaaggattaaaactctgcatctgcccgtccctgcccatgcagccgaatatataaccgacaatacattaaacctatacaaacacgcgcaacctttccttcccggtacagtacaaatcaatccggaaacaggtgaggtatgtatcaaagatgcttcaggagccgttgcgttcgaggtttatgaagataaaaaaatgataggagtatcttatcagcctgttttcaaggcagttgccctccaagggacagatacatcaaaaattcatgtgaaagctgtatctcccaaaggaaaacggagtatatgtaaaatgctttaataaaagacaagtataaaaacttcttctacagacaaaaagaaacagtaaaaaacaaaggaaatatttgtctgaaacaaataaaagaagtacttttgtgcccgattattccgcaacgggttcgacaaagagctctttaagtgattaaagaccacccgccggagctaacttatacattatatataagatgtacgcaattgtagaaattaacggtcagcaatttaaagcagaagctggtcagaaactgttcgttcaccacatcgaaggtgcagaaaacggttcaacagtagaatttgaaaaagttcttttggtagacaaagacggaaacgtaactgtaggtgttccgactgtagaaggtgctaaagttgtttgccaggttgtttcaaacttggttaaaggcgacaaagttcttgttttccacaagaaaagaagaaaaggtcacagaaaactgaacggtcaccgtcagcagttcactgagttaacaatcacagaagtagtagcttaatcatttaaaaagtaagaagaaatggcacataaaaaaggtgtcggtagttctaagaacggccgcgaatcacatagcaaaagattaggcgttaagatatttggtggcgaagcttgcaaagcaggtaatattatcattcgtcaaagaggtactgaattccacccgggtgaaaacatcggaatgggtaaagaccacactcttttcgctttagtagatggtacagttagctttaaagtaggtagagaagacagaagatatgtttctatcatccctgctgaagcaacagaagcataacctgcacaactgaaaatattcaagaaaaggagatgtaatccaaacgattgcatctcctttctttttttatgcagattttcattgctcgcttattcgttttttctttatctttgtagccttaataaagaaagttcataaaaagtatagatatgcttaccattaaacaaattacagaaaatacagaagcggtactccgcggactggaaaagaagcatttcaagaatgcaaaagagacgattgacgaagtcatcgccctcaacgacaagagacgtactacgcaaaacctattagataagaacctggcagaggttaattcactttcccgcacgatcggtcagctgatgaaagaaggaaagaaagaagaagccgaagctgcacgtgcacgtgttgccgaactgaaagaaagcaacaaagcactggacgctaccatgacacaggctgctacagacatgcagaatgtactttatacgatccctaacattccttatgacagcgtacccgaaggcgtaggtgccgaagacaatgtcgtagaaaagatgggaggcatggaaacagaacttcccaaagatgcactgcctcactgggaactggctaaaaaatacgatttaatcgatttcgatcttggtgtaaagattacaggtgcaggcttccctgtatacaaaggaaaaggtgcccaactgcaacgtgccctgatcaacttcttcctggacgaagcacgcaaatccggatacacagaaatcatgccgccgacagtagtcaatgccgcttccggttatggcacaggacagcttcccgacaaagaaggacagatgtatcattgcgaagtagatgatctctatctgatcccgacagctgaagttcctgtcaccaacatctaccgtgatgttatcctggaagaaaaacagttgccgattatgaactgcgcatacacacagtgtttccgccgtgaagctggttcttacggtaaagacgtacgcggtctgaaccgcctgcatgaattctccaaagtagaattggtacgtattgacaaaccggaacattctaaagaatctcaccagcaaatgcttgaccacgtagaaggcctgttgcagaaactggaacttccataccgcatactccgcctgtgtggtggcgatatgagctttaccgctgcactttgtttcgacttcgaagtatattccgaagcacagaaacgctggctggaagtaagttccgtatccaactttgacacttaccaggccaaccgactaaaatgccgttaccgtagcgcagaaaagaaaacagaactctgccatacattaaatggatcagcactggcactaccacgcatcgtcgccgctttattggaaaacaatcaaacccccgaaggaattagaattcctaaagcattggttccatactgcggtttcgaaatgatagactaagaaactttctactcctgtaagaatgagacatctctgccccttacaggagtttcctttattaacctttaacacatttacccccatgacaaaaaacacaaaaagttttgcattgccattggcattcattggcgtcatgttcttttcactgggcttcgcccttggtatcaactcagtattagtccccgtattgaagggatcgctggaaatcagttcggcggaatcatatctgattatcgctgccactttcatcccgtttcttatttttggttatccggcaggacttacgattaaaaagatcggatacaaacggacgatggttctgtcattccttatgtttgccatagccttcggacttttcataccatcggcaagctatgaaagttttcctctgtttttattggcttcctttatcagcggaactgccaacgcttatctgcaagctgcagtaaacccgtatatcacaattctgggaccgatagacagtgctgccaaacgtatcagcattatgggtatatgcaataaactcgcatggccgattccacctttattcctggctttccttatcggaaaagaagtgaccgacattacggtagctgacctgtttctgccgttctacgttattatcgccgcattcatcgcattaggaattatcgcatatatagccccgctaccggaagtcaaagccgtcggcgaagacgacagcgaagaggcagccgaagcctgtccttacgctgcaaagaaaacttccatctggcaattcccgcatttattattaggctgtcttgctctcttcttatatgtaggtgtagaaaccgtatcactgggtacattagtagattatgccaccagccttcatttggaaaatgcagcaatgtatgcctggattgctccgataggcattgtgatcggttacatctgcggcatcatcttcatccctaaatatatgagccaggctacagcactgaagatttgttcggttctggctatcatcggttccgtactggtagtacttacacctgctgatatatccatctatttcatctcatttatggcattgggatgttctttaatgtggcctgccctgtggcctttggctatggcagatttaggaaagttcaccaaatccggttcatctcttctgatcatggcaatggcaggcggtgctgttattcctaccttattcggctatctgaaagacatttccgatattcagaaagcatattggatttgccttccctgcttcctgtttattctatattatggggtagccggatacaaaatcagaacgaaataaataaagatattcacatggatatggaaagtcactcatcaaaagagtgacttttctttttatatttcgtaaataagccgtatctttgccgaaatttataacattctgatagcagttacgtaataataccaacaaattaattagataatgaacaaaatcattagcaaagaacgcttttctgagaaagtgtttaaacttgaaattgaagctcctttaattgctaaatcccgcaaagccggccacttcgtcattgtacgtgtaggcgacaagggagaacgtatgcctctgacgattgccggttctgatttgaagaaaggcaccatcactctggtgatacaggaagtcgggctctcctctacccgtctttgtgaattgaacgaaggtgattatatcactgacgtagtaggtccgctcggacaagctactcatattgagaatttcggaacagttgtttgtgctggtggtggtgtaggtgttgctccgatgcttcctatcgtgcaggctttgaaagctgccggaaacagagtgatcactgtattggcaggacgtaacaaagaccttatcattctggaaaaagaaatgcgcgaaagctccgacgaagtgattatcatgacggacgacggctcttacgggcgtaaaggtctagtaactgaaggcgtggaagaagtcatcaaacgtgaaaaggtggataaatgcttcgccatcggccctgctatcatgatgaagttcgtttgtctgctgacaaagaaatatgagattcctaccgacgtttcattaaataccatcatggtagacggaaccggtatgtgtggtgcttgccgtatcacggtaggaggaaaaacgaagttcgtttgtgttgacggtcccgaattcgacggtcatcaggtggactttgatgaaatgttgaaacgtatgggtgcgttcaaaaagattgagcgtgaagagatgaacaaactccagcccgaatgtgaagcaacgaaagagatagatgagaaaagccgcaacgcagcctggagacaggaactgcgcaaatcgatgaaaccgaaagaacgtacagctattccacgtgtcgaaatgaatgaactcgatgccgaataccgttcacatagccgcaaggaagaagtaaaccagggtctgaccgccgaacaagcagttacagaagccaagcgttgtctggactgtgctaaccctggatgtatggaagggtgtccggtaggtatcgacattccgcgcttcattaagaacatcgagcgtggcgaattcctcgaagcagccaaaacactgaaagaaacaagtgcgcttccggctgtatgcggccgtgtctgcccacaagaaaagcaatgtgaatctaaatgtatacacttgaagatgaatgaaaaaccggtagctatcggttatctggaacgcttcgctgctgacttcgaacgtgaaagcggacagatttcagtacctgtcattgccgaaaagaacggtatcaaagtagcggtgatcggttcgggtcctgccggattatcattcgcaggtgacatggcaaaatacggttatgatgtaacagtattcgaggcactccacgaaatcggtggtgtattaaaatatggtattccggaattccgtctgccaaacaagattgtagatgtagaaatagacaatctcgttcaaatgggcgttactttcatcaaagactgcatcgtaggaaaaacaatcagtgtggaagatttgaaggaagaaggttttaaaggaatatttgtcgcttccggtgccggtctgcctaactttatgaatataccgggcgaaaactcgatcaatatcatgtcttccaacgaatacctcacccgtgtcaacctaatggatgctgcgagcgaagactctgacactccggtagctttcggcaagaatgtggctgtcatcggtggtggtaatactgctatggactctgtccgtacagccaaacgcctgggtgctgaacgtgctatgatcatctaccgccgttcggaagaagaaatgcctgcacgtatcgaggaagtgaagcatgccaaagaagaaggagtcgaattcctgacattgcacaatccgattgaatatattgccgacgaacaaggttgcgtgaaacaggtcattctccagaagatggaattgggagagccggatgcttccggacgtcgcagccctgtagccattccgggagctacggaaacaatcgatatcgatctggccatcgtcagtgtcggtgtatctccgaacccgattgttccgagttccattaaaggactggaattaggacgcaaaggaaccattgccgtagatgacaacatggaatcatctattccgatgatctatgccggcggagacattgtgcgtggaggagctaccgtaatccttgccatgggagatggccgtaaagccgctgctgccatgaatgaacaactgcaaagcaagtaaaaaggaccaccttattataacagaaagccccgtctgctgaatgcaaacggggctttcttatcacaagatacttcttacttcactacgctattcgtcgcagggtccgggaaaatcacggtcggtttaaacgacttcgcttcctcaaaatccatcaatgcgtacgacatgataatcacaatatcatccggttgcaccttgcgggcggcagcaccgttcagacaaatcttaccggaaccgcgttcacctttgataatgtaggtttcaaagcgttcgccattgttgttatcagcgatgtacactttttctcccggaatcatgttggcagcatccagcaggtcttcgtcaatcgtgatactacccatgtagttcaagtttgcctctgtgacacgtgcacaatgaattttcgacttcaacacttcaatcatcataaggtttcgtctttttttaatttagatttctttatacttgatattatcaatcagtctgacctctccgcagaacactgtgatacagcctactacatactgagaatcctcccaactgcttaccttttgcagcgtgtttccgtcaacgatttcaaaatactccaaacgcaatcccggagcagcctctatcgcctcttctaccatcttctgcgtctcactcactgtgtgagatgctgcaaaggtacgacttttaaataatgtctgagaaatatttaaagcattttcacgttcttgtgccgataaacgtttattccgactgctcagagccagtccgtcttcctcacgaacgataggacaacctacaatttccagtttataatccatctgacgaaccatctcccgaataatcgccagttgctggaaatctttctctccgaaataagcacgatccggttgcaccgcgtcaaacaacttgctgacaatctggcaaactccgttgaaatgccccggacggaaagccccttccatcaccgtatccaacggagcatagctgaattcacgcgtatccggctgcggatacatctcttctactgaaggagcaaaggcaaatgctgcaccgcaatcttccaacaagcggcagtcagcatccagtgtacgcggatactttgctaaatcgtttttatcgttaaactgagtgggatttacaaaaacactcactactgttacaccattctcacttacgctgcgctttaccagtgatgcgtgtcctgcatgtaaagcacccattgtgggtaccagtcctaccttcttaccctgggctctcagtgccgtcaattcggcctgtaagtccttgatagtgtgtattactttcatttttgttaattggtttatgttttggtcgtttgcaaaaactctgcaaaataaactaatatttgccacataaagaaagaatatggtatttaaagttccttttttttgctatctttgcagaatattatagtgaactattgttattatgacaaaggcgaataaagttttatttattactcaagagattacaccttacgtttcagaatccgaaatggccaatataggtagaaaccttccacaggcaatacaagaaaaaggccgtgaaatcaggacatttatgcctaaatggggaaacattaacgaacgcagaaatcaactgcatgaagtaattcgcctctccggtatgaacctgatcatcgacgatactgatcacccccttattataaaagttgcttctattcaatccgcacgtatgcaggtatatttcatcgataatgatgattatttccagaatcgcttgcagacagcggatgaaaatggtgtggaatacgatgacaacgacagtcgtgctatcttttatgcacgcggtgtgctggaaacagtgaagaaacttcgctggtgtcccgacgtaatccactgtcatggatggatgacggcattggctcctctttatattaagaaggcctacaaggacgaaccctcgttccgtgatgctaaagttgtattctcggtatatgaagatgatttcaagaatacgctcagtgaagattttgcaaccaaactgatgttgaaaggcatcaccaagaaggatttggctggtttgaaggaaccggtagactatgcggcactttgtaaacttgccgttgattattctgacggaatcatacaaaacagcgcaaaggtagacgaatcaatcattgagtacgcccgtcaatcaggcaaactggtacttgattatcaggatccggaaaactacgcaaacgcttgcaacgaattctacgatcaggtatgggaaaccactacaaataaagaagaagaataaaaatctagatacgacaatcatgaaagcaaaatatgccttgatagctttattggcaatcacatttttcggatgcgatgataatacaggcggactgggattaggaatgttcccgggcaatgaccaaaatatcaaaggaaagttatccacgtttgatgtaactactaaatcaattcctactggaaagatctatgccaaaaccaacatcggatatgttggaaagttcactgatgaaacattcggtacttatcaggcaggcttccttgctcaactgaattgtccggatggcttaacttttcctgaagtatatacagaaaagaaagatgctagcggtaaagttatctcagctacaggaaaaatggttataactaatgaagatgacgaaacgattgaaatcattaaggatgaccaaggtaatcctattggcaacatacgtactaccgaacttttcttattgtatgataactatttcggtgactcactgactgcttgtagattgagtgtttatgaattaggtggagataataaagaaacactaaacacagataatgcgtattatacaaatattattcctgaagaattctatgatagccagaatcttttaggaacaaaagcttatacagccgtagactactccctatctgaagaagaccgtaattcaagtacatacgtaccctatattcacgttgcttttaaagaagacagagctaaagaagtgggcaaaaatattctagaagcatcaagagcagctggaaaaaaatttaataatcagttatttggaaaagcctttccagggatttacgtaaaaagcgattatggtgacggaacagtactttatgtagatcaagtacaaatgagagtagtatacaaatgttatgctacagattccatcacaggcattaaattaaaaaagcaagatggagttaacgattcaacctattatacttggcgtcaatttgcttctaccagagaaattattcaggctaatcaattaagtaatgacgaacaagccattaatgaaagaataaatgaaaaaacctgtacttatttaaaaagtccggcaggtatattcactgaagctacattaccaatttctgacatagagaacgaattaactggcgataccttaaatgcagtaaaactgacattcactaattacaatcaatcaagtgacaagaagtttggtatgtctataccatctactgtaatgcttgtacgcaagaaattccaggatagcttctttaaagacaataagttgagcgatggtgtatcttcttatctaacttcacatacaagtagtacaaatcaatatgtattcagcaacatcaccaaattggtaaatgcctgcattgcagaaaaggaagaggctaagaaagcaaagggtagtgaatggaatgaagctgactggttacaaaaaaatccagattggaataaggtagtacttatacctgtacttgtgacttatgactcttcaaacactacaaccggtcaggctaatattattagaatacaacatgacttaaaacctggttatgtacgtctgaaaggtggagaagctggagaaaatccaggtggtgagaattacaagttgaaacttgaagttatttctacagacttcggattaacaactaagtcaaactaaaaagatataatcgagtaggaggaaaacgaagtagaagttttcctcctactttcgttttccgacctctcacaccaccgtacgtgccgttcggcatacggcggttctcttaactgcgatgcaattgggtataaagaattatcattgacggataacccgccattacaagcttatctgttgtgattgctctatgcaatatccaactatccgcaatgcgccaatagcctttacgggtattcgcccattcccaagatttccgacgagggatgccacacttctgcaagctggcaaaacgtgtacgtacccgcttccaactcttccatatatacattctaagacgacgattgtaccacttcgctgttttgattataaaatctttcatatcggcataacgatagtatgtcagccaacctcggatgtattgcgtcaggtggagtttcagccaagcgtagccttgaccactactacggctggtcaggtgcttgatggtgcgtttgaacttggattgacttttcttatgaagattaagaccacatttacggtcggctcttcagtagaaggagtgtccaagatacttcttgccgcagatggaaccgacttctgtcttctctttgtttactttcaagaataacttcttttctataaactcggaaatactatcacggactcgctccgttgcccgaagactatggacaaggatcagacaatcatcggcatagcggacaaacgggtgccccctgcgttccaattcctggtccaactcattaagaagaatattgctcaatataggactcaatggaccaccttgggggacgccctcggcagtctccgcgtatttgtgagatactacaactcctgcattaaggtatttgtgtatcaaagatattacactgccgtccttgacggttcgggataagacctctatcagtttgctgtggttaacacggtcaaagaacttttccaaatccaaaccgatacagtagcgataaccttggtctgcatattcctgcaccttatgcagtgcatcgtgagcactacgatgagggcggaagccgaagctgttgtcactgaactgaggttcgtaaagcggtatcaacacttggctgattgcctgctgaacaaagcggtctaccactgtcgggatacctaatgggcgagttttaccgttgtctttcggaatttctaacctgcgcacaggggacggacgatacttccccctgcgtatcttttccaacaattcgtctttatggagggtaaggtatggcaacagttcgctcgtctccatcttatcgacacctcccactcctccattccttacgacttggcggtatgccgcattcaagttcgatggacttagaaggagttccaacagattgttttcttccaattgcacttccacaagctgctcatcttttatctccataaaagtctgcactcccacatactcgtcggatgctgtcctatccatttgtgggcagttcgttttactgattttccgcattgactctttcataaagtattaaatggtacttgtttgattaaaagttcagtccttcaccgactgccgatttttttaccttgtcggttactatgacctctgctgacttctcacggttcgttattactgcttgactgtatttatttatttttcctcgcccgtgagacctccccagttatggacatattctttccatcttatgtctgcttgatttactttggatgttccggacaactataggacttcgttttgtttagcaaacttatccacatccttaagccttaatatcaagtttctgtacgtcagaccagatatttgccgcaggcttccttcagattccacctcacgatggacacccttgccgttggctatatacttcccgttgtcagggcgctttagggacttacacccgttagaatatgttcgtgctgggcgaactaaaataaacagcgcgggttacttcggtaattcgcgctgttttttatatgtacctgtcactggaattaatagcaaacaagcccttttcggacaatcccattcctatataacattccaatataacatcgcaatataaaaaaacaaccgtgaggtgattcccatctccccacggttacaaccagttaatttattattatcttattcttctttctttgcagtagctttcttgcgagtagctttagctaccggttcctttttcgcagctactttcttggtagcttttgcagctcctttttcagcttttgcctgccatttggttacttccttttgcagttcggctatctcctcaccctgattcttaatagtagtcagcagagagttaagctcttcattatctacatcaacaggatacagtgaatctactcgtttgataaagtcgcccaagatattcatgtagttagtgaaggcatcgtaaggagagtcatagatgccacgattcagccagatacctgtattcttggtagtcatgaaacggaagttgttgctggcttgcagataatcccagtcctgcttgatacgacggtcgtcacacaggtgaacacgttctgctacgctatacaacttgttgaaagcctcacgctgcaggatattacccagccaactgcttgtatctctttcttcgtccacccatgacattggataaggaacatccagttgagatacagatttcaatttagatacaatctctgttggagtagagaacgtgataccctttgatttagcacattcgggcaatgctttcaggaattccaggatattggaagaaagcggctgagccatacccaatgcacttaattccataaagatattaatcacttgctcttcttgtggcaacgcatcaatccagttaatatacttatcagcaaataatggatattccggccattccgaattggagaaacgcaatcctatatcatcagaaagtttaaagtctctcaacagcaatttgagacttggagcctgattgcagtgatatacatagtgcgggctcttccatcccaatacatgttttgcaccttccgtcagcattcccttaaagcccatagaagctaccagtccacctatttcatccgaataaatcaagctggaattgcggaacaccttcggttctttgccaaacatctgtttcattttatcacgctggcgaagcacttcttcacggaagcagtcttcgttagccaaagatgacaagccgtgtgaataaggttcgcaaaggaactcacaacaaccggtatcattcaactgatgcagcaagtcaatcaccgccggagcatgaatttcaagttgctccaatgccacaccggaaatagaaagcgccactttgaaagctcctcccgagtttttcaccatctcgatcaacgtgctgagagcaggtatataagatcgttcggcaacctcattcataccggtttcatttgcatagtcatcatagtaataatgatcggtgccgatatcgaaaaaacggtagcgtttcaagtgtataatctgatgtatttcgaaataaagacagatcgttctcatagtctatatcattttattgtttaccataatttttaataacctcatcatagataccgcgaactttatatcccacgttctcccatttaatctcatccacttctttcttaccctcttctttcaggtactcgtacatagccgggtaagtacagatagaataaatggcatccgccatagcgtgaatatcccagtagtccgttttaatacatttatccaaaatttcggcacagccggattgcttggatataatggaaggtacactacattgcatagcctccaacggagagataccgaatggctcagatacagaaggcataatgtatacatcactggctttcagcacttcgtacacctgctttcccttcataaaaccggggaaatggaaacggtccgcaataccgcgttcggctaccagacgaatcatctgatccatcatatcaccactaccggccattacgaaacggacattgcgcgtacggtgcaataccattgctgcagcctctacaaagtattccggtcctttctgcatggtaatacgtcccaggaaagtaacgaccttttcgctcggattcttttgaggaacaatatcctgtatctcttgtgacaaaggagaaacggcattatgcacagtagacaccttcttcgggtcctgaaaatacttatggatcacagtctgacgggtcagttcgctcacacacatgatgtggtcggcattgtccataccattcttctcaatggcatacactgtcggattgacattgccgcgactacggtcgaaatcagtagcatgcacatggatcaccaatggcttaccagatacttgcttggcatgtatccctgccggataagtcagccagtcatgagaatgaatgatatcaaactcctgctgacgtgctaccaccccggcaacgatcgaatagttattgatctcttcgtgcaggttgtccggataacgtccggagaactcgatgcatcccagatcattcgtattgagatagttgaagtcggcatagatatgatcgcgcaagtcatagaacaattgcggatccatataactgcctacgcgtcctttcacatagtcccaaccgacatttttccacactaccggcgtgctgttcatgccgataattcttaaaaagctctgatcttcgtctccccatggtttgggaatacagaatgtaatctccagatcatcctgctgagacattccttttgtcagaccataactggcagtccctaaccctcctaagatatgcggggggaactcccatccaaacattaaaactttcattttcgttcctcctctttttaataatacttagacagtagctttagaatacgcagtacttcggcgacattcatggcaaacgatacagctccgcgtcctttaaaaggcggattaccatcgaaaagttcaggcaacgaactgatacaatgaattgtcagttcatcttcgagaccaataagctggcgttcaatgaacgacagaccactcatcttataaattcgcaaataggcttccatatagaatcccatcagccaaggccaggctgtgccttggtggtaagcgtagtcacgctgtatctgaggaccaacatagttagggttatagcccccgctcttcggactcaaggtacggagtcccttgggggtaagcaactctttggttgctatgtcgagcacttgcttcttttgtgccctatccaacggagaataatcgaatgctacagcaaatatcatgttggggcgtacgctccagtccatcatatttccgtctacatagtcaagtaaatatccatattcgttgcggaacacttcgataaatgattttcccgtcacttccgcctgtgcgtcaagcgcatcggccaaaagaacgtttccatcttcacgaaccagatcggcaacgaaacgaagcgcattataccacaaagcattaaattctacgatatatcctgtacggggaatcaccggatgtccgtttacggtggagttcatccacgtaatcgccttatcggtgccattggcataaagcagaccgttttcatgcaggaagaggttctcatgtttccgctgacggataaattcgatgatatctttcagcagttcgccatatttctgacggcattgttcgcgggaggtctccttggcatactgttgcaaagcccatacggcccaaagcagtacatccggatgttccatctcgtaaatcttgtatcctgccggctcatcattgatgaagcttcgaatcgctttttccgctgtcttcatcacatcttcaaactgatccacctcgtccagcgcaagtgtcagtcccggcaaagatataaacatatcgcgggcacggcacttgaaccacggataaccggcaaggatataatgttctccttcctgctggttgtggaactgatgtgctgagtttttcagacagtgatagaagctatcgcgaggcgtacggtcagccacttcggcttcgaacgtctgcttcagtctgcgcggagtcacttcggaagtacccgcggagaaaacgatgctttctcctttctttatatccacttcaaaatatcccggaacatataggtcttcattgaagtcatagcctcgttcttgttctttcggatattcgaatccacgataccagtcgggctggaaatggaactcgcaagccttgttcaactgcatgaacagttccggataaccgggatacatacaagtcttgataccattttccacaagctgataatcgcggcttgcctgcgcattctcgtgagtgtactctcgcacgctccggaaagcgaggaacggtcggaagcgcaaagtcgtcgccgaatgtgcgtccaacaaagtataacgaatcaggattctgttttcatgatgtacaaagattttttctttgcgtaacactactcctccaacacggtaagttgtcgccgggatatgctcacaatcgaattcacggatatacttatgtccattcggactaaagttgtttccctgatatttatgcaaccccaagttaaactcagcaccatgttgaattaccgtttcatcaagagaagatagcagcacatgattttcatcgtcgatattgggaacaggaattaccaacagtccgtgatatttgcgtgtgttacaatcaacaatcgttgtacaatgataagctcctgctttgttcgtccggagaatctccctttggagactttcttccagattcgtcatgagggtcttgtcaaatcgtaaataactcatagttgtgcattatttaaaggttaattattggtcactatattccttatatatatctattgctgttctgtatatataccagcctgagcattgtatatataggtataatgcccaaatgtacaaattctagataaaaacaaaaataaaaaggctttttattttcagtttttgtgcaaatattcgtagtattgcgtaaaatatctaaagaatagaaagtaatgaagcgagatattcagcgtatcatgctggctacagcggtgccgttgttcctaatttttatcctatttctgctaaagatcgttgaagtcggcatggactgggacttctctcacatgggaatataccctctggaaaagcgaggaataacgggtattctgactcatccgctgatacacagcgggttcagccatttgctggccaatacgttgccgctattttttttatcatggtgcttgttctatttctacagggggatagccggacgtatttttatgatcatctggatcggagccggactgctgaccttcattatcggcaaaccgggatggcacatcggtgccagcggactgatttacggacttgccttctttctttttttcagtggtatcctgcggaaatatgttcctctgattgccatctcactgcttgtcacctttttgtatggaggaatcatctggcatatgttcccctacttctctcccgccaacatgtcatgggaaggacatctcagcggaggaatcatgggaacactctgtgcattcggtttcttgaatcacgggcctcaacgaccagaaccttttgcggacgaaacggatgaagaagaagaggaatctccggaagaagatatcaacaatacaaccgactctacggatattacctcataaatcccggttacgacttatgcaatgcctcaatcagcaaggtgatattagcagtaaacaaccttactgagatagcgagcaggatgataccgaaaaacttacggatgatatagatcccccctttcccgaggaaacgttccacacgtccggtcatgcttactacaaagtagacccatagcatattcagtatcaaggcaataataatgttaacactggcatattcggcacgaagcgaaagaagcgtagtaaaagctccggcccctgccagcagcgggaagacaagcggaacgagtgtcgcttcctttatcggcccctgatttttgaagatttctatatccagaatcatttccagagacatgaggaaaataacgaatgcgcccgccacggcgaatgattcgatatctacatgaaaaagtttcagcatcatatcacccgcgtagaagaagcctatcagtaaggcaaaggagatgacagtagcctttgttgcattcacatctttccccttttccttcaggttaataataataggtatagaaccgataatatctattactgcaaaaagtacgataaacgcactgatcatttgctgccaattaaaacccgtgaacataattcctccttttttttgcaaatatactctatttttatgcattcaaacaataaaaaaaacaaaaagaaaggggatatgtggatagcagtgttgtattatgagtaaatttgtacgattaataagagattacaacgtatggaaacaatgttcgatactttgctccaattacctttatttcaggggctttgtcatgaagatttcactagtattctggataaagtcaagctgcactttatcaaacataaagctggggaaaccatcataaagagtggtaatccctgtacccagctttgttttctgttgaaaggtgagatttctattgtcaccaatgcaaaagaaaacatttatacggtcatcgaacaaatcgaagctccctatctgatagaacctcagtctttattcggtatgaataccaactatgcttcttcttatgtggcacatacggaagtgcatactgtttgtatcagcaaagcattcgtactcagtgatctgttcagatatgatattttccgcctcaactatatgaatatcgtcagcaaccgggcgcaaaatctctattcccgtttatgggatgaacccacgctggatttaaaaagcaaaattatccgtttctttctgtcacattgcgaaaaaccgcaaggggaaaagactttcaaagtaaagatggacgatttggcgcgttgtttggatgatactcgattaaatatttctaaaacactgaatgaactacaggataatggtttaatcgagttgcacagaaaagagattctgattccggatgctcaaaaactactttaagagattgacagtttgggtagaacaatctaatatatataaggtagaaaaaagtcaaaagaacagtcttctaattattttcaaaggaaaaatcgacctaattatttaaattaattgcattacttttcatcctggagagcaatagagaccttatgccaaattgaataattttgaagaagtcgtaataggacttggtatttttataccccaaagtatattttctactgtttccataggctattcaaaggttattaagtgcatgtactattctaagacggtgtaaagttattaataaaatcgaaaaatacaatatcttttttattttaattatcaacaaacaccatttttttagaatctcaattctactatatagttcataaattgtcatcccaagcattcatcaaccaattaatcaattatatataagacacttatatacacacataccaagtcctattacgacttagccccaattaatcaatatgattacaaccttaaattaacatttatgaaaactcttagcaacagccctccgcctttcaaaatcggagaatttgatctcattttttacttttatttcagcacagatcagaataggtatgatatgtattctgaattcattatcaacttcaatacccccaatttaagaagatgaataatagcagtcaaacacacccatatattttcaaacttactcatacatacaaaaacaaacgtataccccttgtatgcataccctagttctacccacatagtagacacacaagagtaggttttcctatcactttttttttaaccaatctaattattaaccttttatcacagaaaaacaatgcgaaaaagaagagtttattggacgctgttcattacagctttcgcgtggttagcttcctgttcagatgacgacatcaatggaagcagcgggttcaacccaaaccagcctattgagattacagaattttatcctgattccggaggtatagccactccgatgatcatcgaaggccgcaacttcggtacagacaccactggcatgaaagtctattttgaagatgtagacgggatcagacatcctgccggattagtcagcagtaacggtagcagaatctatgcatttgttcccaaaggactcaccttcaaaagagagatgaatattcttgtagaaagaagaacgcccgacggtcaagaatacataggcaaagcaccagaccaattcctatacaagacacaaaccagtgttagtacggtagcaggacttgcatcaccggacaataatataaacaccgttggtggtgaccttgccacatgtactttctcctctcctttctatctctgtatagacggtgaagacaatatatttgtggtagaccgtaaaggagacagtggaaaagacaaacaaccaaacacaacctgccgtaatgaaaaaggtgaaggcgtaaacggaaacatttcaatgatttccatcgccagcaactcttccattgtattaaaatatggaactgcatatattaatgcaccggcttattctgatgaaaaagatgctgaagctgtttacattccggatgatgccggcatgaaatattatgatatgcaaaaacttctaaattatgttccccgatatagaacagtcttgaaatcagaagaactcagcactgtagacgaaaacaactggaagcattgctttgtaatcaacaagctggatcatatgatctatacggtcatgtggaaagggcaattggttcgaatcaatcctaaaaaccgtacagcagaaattttgctaaagaaaatatctaatgtagcaacaggcgacggcggcaaagcaggaagtgactcctatatcgcattcagccctattaaaggagaagaaaacgtactctatgtatctcttgcagattttcaccagatttggagagtggacgtatccaagatcactccggaagataaagacacttataacggagaatcatacgcaggaaaagcaatctacgaaggagttatgaacgggaagggctgggaagacggcttgctgaagaacgccaaattcagacacccgcgccagatttgtttcaccgacgacggaaaaatgtacattgctgacagtggtaattcctgcatccgcgtaatagatactactatgccgaaagaaagagcagccgtaaccacacctatcggtctgccgggagcggaaggttataaggatggaggtccggaaattgccaaattccacttcccttgcggagtagcagtcaacagtgatggaactattgtatatgtagccgacacacagaacaaagtgattcgtaaattatccattgaataaccttatacaaaatacaatatgagaaataattttctactgattgtactgatcatggcgcttataccgctgacgagttacagtcaagacaataagaaaaaacagtttactgtagcgggggtcgtaatagacaaaaccggtgaaccgctaccgggtactaccatttatgttaagaatgcaccgggagtgggaacctcagcagatatggatggtaaattcagtatcaaagtagatgccaaccaaatattagtcattcaggctattggaatgaaatctatcgagaaactggtgactaaagatgaaatgacactcaaagttacattggaagaagatgacaccaagcttgacgaagtagtggtcacaggtatgacttcacaaaaaaagatatcagtagtaggtgcaatcagtaccattgatgtagcccagctcagtactcccggtacttccctcaacaacatgatcggcggacggttggctggtgtcatcaccatgcagagttcgggcgaaccgggaaaaaacatctccaacttctggattcgtggtatcagtactttcggagccagctccggtgcattagtgctgattgacggtatcgaaggccgccttgaagacattgatcctgatgatgtaaaatcgttcagtatcctgaaagacgcctccgccaccgcagtgtatggtacccgaggtgccaatggcgtggtcttggttaccactaaacgtggagaaacaggcaaacttaccatcacaggacgagcaacattaaaagtatcgcatatcaaacgtctgcccgaatacctgggagcttatgactacgctctccttgccaatgaggcacgtgccatgtcgggtgaagacgacctttactcccgtctggaactggatctgataaaatacaatttggataaagacctctacccggatgttaactggatagatgaaataatgaaacgcacatctatccaacagaactattacatcaatgcacaaggaggaggcgacatagccagatattatctttcattagggtatcaggatgaaggagcggcctaccggcaggaagacaacctgttcaaaaagcctttgtcatataaaaaaataacatatcgtgccaatattgacatgaatctgaccaaaacaaccaaagtttattttggtctggacggatatatttccaactataccagcccgggtggacaaaacacgaatacggtatggtcagcagtccgtcagctaactccactgatgtttcctaaaacctattcagacggtaccttcccttcttatggaaaacatgaccttgcttctccgtatgtcatgctaaataacaccggatacacgcaagatgaaactcagcgtaatatgcttacactcaaacttgaacagaaattcggaggattcctgaaaggaatgacagcgtcggtacaagcgatgagcgaaaatatcaattatttcaatgaaggacgttacatatggcctgacctctaccgcgctacaggaagaagttcacaaggggtactcatcaaaacattacgtactgccaaagagaacatgaaatatacacaaaataacaacagatacagaaaatactacatggaagccaaagccaactgggaccgtacatttggtttgcactcactaggagcattggctttatattacatggaagatgttcataacacccaatggaagtatgacgcgatgggtatcaatgccattcctcaacggcgtcaaaatttatcaggacgtgtttcctatggctataacaattgctatttcattgatgcaaacttcggttacacaggttctgcacaattcgaaaaaggaaaaagattcggcttcttcccttccattgctgtaggctgggtaccgacatcctataactgggtcaatgaggccattccctggttaagcttcctcaagttccgcggctcctacggtcaggtaggtaatgaccagatcagtggtgaccggttcccttatttgacattaatcaatgacaatgccgcctcttactggggatatcgtgaacggggtattacagaaactgtgaaaggagccgacaaccttcaatgggaagtagcaaagaaactcaactttggtatcgatgccaagttcttccacgacaagctctctgtcactgttgactttttccgcgatacacgtgatcacatcttccaggatcgtgtgacgctgcctaagtttgtaggtatggttaccgtcccgaaatcaaatgtaggaaaaatgcatagctatggttctgacggaaacttcgaattcttccaccagatcaataaagacatgagcttcactgtacgcggcaattacactttctctcagaatattattgattactatgaagaaaacaagttaccttatgattatctgagtgtaaccggaaaaccctttaacatccttcgcggatatattgcagaaggtctcttctccagtaaagaagaaatcaacacaagtgccgaccaaagcggattcggccgcattcgtccgggagatatcaaatatcgtgacgtaaatggagacggtattatcaatgacgatgacaaagtacctttgtcctattccaaccaactcccccgggtaatgtatgggttcggagccgattttcactggaaagacttaaccctcagcttccttttcaaaggttcggcaaaagtagactactaccgttcgggactcggtaatgacgcaggatggattcccttctataacggagaactcggcaacgttatcaagctggccaacaatcccaagaacagatggacgcccgcatggtattcaggcaccaccgctacggaaaatccccatgcagaattcccacgtctctcctacggaggcaatacgaacaactcccagctttcctctttctggaaacggaacggttctttcctgcgctttcaggaactcagtctgaagtacaacctgaagactccatggataaaaaagacaggactatcttctgtcgatctggagtttgttgccaacaacctttttactatcgacaaagtgaagtattttgatccggaacaggcatctgcaaacggggccgcttatccgataccggcaacttacacgttccaggtttatcttaaattctaaaaataatatagaacactcatgaaaaagttattcaaaataatattgggagcaacagtaggaagtacactactactcagttcctgcaattttctggatgtagacccatacttcgaagctactttcaaagaagactccatctttcacagcaagaaaaatgctgaaggttatctctggaacactccgaaaggttttcccgacgcaggggctatctggggaaattcctggaatccgggggaatctgcttcggacgaaataacacttaaatatcagacaaatgaattttggggactacaattttccgtaggtaccatcaacagcagaaatctgcctatccaaaaccaatggtacgacatgtatgtcattgtagcaagatgtaacaaaatgcttaaagaagtctacaatgtacctgatatgaacgaaatggacagaagacgttatatcggatatgttcactttatgcgtgggtacgcttattatcatcttttgatgaactggggaccgttgattatcgtgggcgatgaagaactgagcacctccgaacctgccgaatattataatcgcgaacgggctacctatgatgagtctgtagattatatatgcgatgaattccgcctggcaactcaaggcatctattcggcggatgagcaaagcgtcaactattatcaacgtccgaccaaaggagcagccatggcactcatcgcccgtttgcgcctcttccaggcttcaccgcttttcaatggcggagctgcagcccgtaaatgtttcgggacctggaaacgtaaaagcgacggagcctactatgtcaatcaagagtatgacccgagacgctgggccgttgcagcagctgccgccaaacagctgaccaaaatgggatacgagctacatacagtggaagcagatgcccagaacccatatcctctggcctccaatgtccctactgctaacttccctgacggagcaggcaatatcgatccttatcactcttactccgacatgttcacaggagaaggtatcatacagactaataaagaattcatctgggcgatggaatccagtaacgtcactaactatacccatcactcattccctgtcaagtttggcggatggggttcaatgtctgtgccgcagagggtaattgattgctatctgatggcagatgggcggactattcataattcatcggcagaatatccatatgaaccggacttcagcagactcaccggcgaatccaaaaaactagggacatacctactgagggaaaacgtacctatgatgtacgccaatcgttcggcacgcttctatgcctcgataggttttccgggtcgctactggccgatgagttcagcttctaccgacgcctcctacgtcaatcagcaattctggtattctcacgatgataccaatgccggaattgccggtgccggaaataacgtaaacgactacagtgtcagcggttatgttcccgtcaaatacattcatccggacgactcatgggctaacggcaaagggagtgtaaaaggcgcattcgtcaccagccctaaaccgttccctatcattcgttatggtgaagtgctactggaatatgtagaagcattgaaccgtgtagaaggtacagtgaccgtagaagtatccgacaatacaggtacacttattgaggaaaccgttagccgtgatccggcagaaatggctaaatatttcaacatgatacgttatcgcgtcggcttgccgggagtagatgccaacgacatggcagaagcagacaattttgaaaaaatcatccgcaatgaacgtcaggtagagctctttaacgaaggataccgatatttcgatacgcgcaggtggggaacctatctggacgaagatgccaacagctccaactggcggggactggatgtgacaaaagaccgtacaaatgccaacggtaatgaaggattctggaatattgtgacgatcaatacacaaaatgtgcgagaccgcattgcactgcctaaaatggtattcttaccgatccgccatgatgaattgctgaaggttcccaatgccgaccagaatttcggatgggacagataatatcaaaacatgaataacagactgaatatgaaaaagaaatttaatataatgctctgcacccttataggtgtattgagtgcttgcaatgaatacgatttcgaccaggaacaataccggaacgaagtaggcttactcagtaattcgagtctgatctacgaccggcaggtggctaatgtaggacaagaaaaagatacgatctatctggttgccacggttagcggctcacaaataagccctaacacacaccatgtagctcttttggaatcggactctttgctgaaagcatacaacaaatccaactttgatatagaaaaagaaaaatttgccaaactgcttcccgatgaatgctatgattttcccaataaggaactggatattcaggcaggcacttccaaagtaatgtttccgatctatctgaaaaatctggaaaggatttcaccggattccatttattttctggattacaagatagatccggaaaaaacacctaattataatccggataaaagtcatgtattattgcgtatctataaagaaaactattacgcaacgacaaagacttctacctactacaattatacaagcagtacgattgtaattcctaaccccagtggtagtcccgaagtccgtagaccgacaaatgccaatcaagtattcccgatcggtgccaattcggtacgcatgatggcaggtgatgaagatcttggcgattataagacagcaagaagcagaattgtatctaagagtatcattctggaaattggcgagcagcaaccggagaatcctcaggccagagaacttaccatcagagcgcatgacagagttaatgatgtggaagtggatccggtcgatgtagtacaacttaccccaatcgatgattacgacaacacattcctgttaaacgctatccgtactcccgacggacgtgccacttattacaaagagttccgtctgcattataaatatcgcctggaatccaccgccccttaccgggaagtgaaagccaaactacgatatgaatttaacccaagagtagataacttgtaatcaaatcaaatgagtatgaaaaaaaatatattaatcatcgggctcgcaagcatattcggaattgcttccggacttatctcttgttcgcccgattacgaaaccgagtttaaagtagaaacgctcgtagttcctgataaaagtcaggcacctatcactttcccacttctgggaggagaacatgaaattgaagtgcagaccaatgtaccactcgacagatggagtgcccagtccaatgcagaatggtgcaaggtagtacaacacgagggcaaagtagtcgtatctgccagtgcaaacaatatatacaaacaacgccgggcagaaatcactgtagcctatggtcatcaaagctattccatcactgtctcgcagtttggtaaagaaccggccatccttataggtgacaagctacaacaggaaggatatgtagaaataatagatgcagaaagagaaacattgacaattcctgtagcgaccaacctgaatctggataatatcattataccagacacttgcaactggatacgtctggcagagcaacctgccacatttgatgcaaagacgcgtgcagcggaagacgtaaacaaacaggaactgaaatttacgctggataaaagcaccgagactgacgtacgttattgtacgattatcctccagtcttcccagaattacagctatacagcttctttcctgataaagcaacaacccagaggttatatagtcgaaatcgatgaagacaagaagatctatgaagtgaaagcaatgggagaaacaatcactattcctttcaaagtaaattctcctgccggtgaagtgtcatatacctatgaagtcgaagaatccgcccaatcctggatcactccagtatcattacccgcttcaagagcactgcgtgatgtctccgaaagctttatcattaaagccaacactgaagttgagaatcaacctcgtgaaggaaagataaccttcaagagtaccaatagcaccgacaaagtaccaagtcagttcgtagtcacagtaaaacaggccggatttatcgcgacacctcctttaaatgtgatcaatgctactgctactccgggagccggaagtattcagctgcaatgggagatacctgaagatgtagacttcaacaagataaagattacctattacgataaagtcacgaaagaaaataaagagatcttaataaatgactataagacaacatcctatatcatagatgatacttaccaatgtgcaggtgaatactcatttactatcaacacctatggtccgactggtatggagacagatagtccggtaacaataacaggcatttccggcgaagcttccgaaatggaacgtgttactcttactatcgatatgctttccgacaatgctaatcatgtcggagacggaggcggtttaccggcattgattgacgggaaggtgaatacttattatcataccaagtggaatgctcctgttacaacagaagcacattatgtccagatcaaactgaacaaaccattaaaggacctttgttttgaatatgatgcacgtcaaagcggagtgaataacggaggtgacgtaaaagccgcaacaatatatggaagtatgaacggtgagttctttgaaagtatgggtaatgaagaattcaatctgccgacaacaaacggtggccatgccacagctaaaaacaatgtgagtggaaagcaagcttacaactatatccgatttactcctacggctcgccgtgacaaagatccattggattatactgtcgcaggcagtgcatggtggaatatgtccgaaatatacctttacagaataagacatgatgaagcctgggcaagagaacagctaggcatttaagtaaaacaagaaaagactgacgaagaacaaaataagatcagattagacacattttcttatcgagttcttcgctagtcttacttttttataaaattggatgataagaattatgaatatgaaacccaagaaattaagcctcttattaactatcttgccaatgattattgcagctacaggttgccattcccagcaagagtctaaagtagacatcactcctcattgtatcaatcttcaggcagacagcctctaccggcaagcaatgacattaatggaatcttcttgcgatgtagactccacccgaaaatgcatccgctttctggacaaagctttggcaatcgacagtttaaatcccgactattacggcatgaaagccaaacttttatctgaaatgggagaactggactccgccctatacatacaaacacttgctatggagaaaaacgcaattaccggtgagtatctgttccaactgggactacttcaagctgccaaagatatgcacgctgaagctcacgaaagttttggaaaaagcaaggtcttccttcaagcagtactaaaacaatatcccgacagcttgggagcttttattctggcagaagctgccaattctctctacgaaaataaagattcacttttcatgagaaatatagatgaaatccgtaaacgctttcccgaaaggttgctggaaatagagatgacccgaagggtgaaaccgcattcattggtcaatcaaataagaaggattaaaatagaaaaggattataatattgattttgatatggatagtctggttgaggcgactgtgaataaagactaagttccaactttcctccccttttctttgttctttcagccggaatagattacttttgtcttattccgtgagcaatgaactaaaataacaggaaatatgatagaagatgtgaaaagaatcccatatggagtttccaatttcgtggaagtggtagagcagaatcaatattatgtagataagaccatgtatctgcctctgctggaacagcagcccaacagtctattctttatccgcccccggcgtttcggcaaaagtatcttcctgagcatgcttcgcacctattatgatatttcgcaaaaagaaaagtttcagaaacgctttggtaatttgtggataggcagccagccaactcccctacagggaacttttcagatactttttcttgatttctcacgcataggcggaatcgacggtacattggcacagaactttgacgattattgctgcggtggattggatgacttcgcatccatttatgaaccatactattatccgggatttgcattagaaatgaagcaactggaaggttccaccaataagctgaattttctggatcgaaaagcccgcaacaatggttcccatctctatctgattattgacgaatatgacaacttcaccaacgtggttctgaacgaacaaggtaatgaaatctatcatgccctgactcacgccagcggattctaccgggagattttcaaaaagtttaaaggaatgttcgaacgcatcttcatgacaggtgtcagccccgttacattggatgatctcaccagcggattcaatatcggctggaacatcagcaccgatttccaattcaatatgatgctgggattcagtgagacagatgtgcggaccatgtttcagtactataaagacgccggacaactgccggcagatacagacatagatgcactgattcgggaaataaaaccgtggtatgacaattattgctttgccaaagaaagtctggaacgtgatccgaagatgttcaactgcgacatggtactttattatctgcgtcattacataacgttggggaaatctcccgaacaaatgattgaccctaatacccgcacggattacaataaaatgaaaaaactgatccgattggacaagctcgacggaaatcgtaaaggtgtgttgcgcaaaatcaccgaagaaggagaagtcatcaccaacttagtgacaaccttccccgccagcgaaatagccaatccggaaatctttcccagcctgctcttttattatggcatgctgaccattaccggtacacgaggagtccgcctgatactgggtattcccaacaataatgtacgcaagcagtattacgattttctgttagaggaatatcaagagaaacggcatattgacttgaatggcttaagagatttatttgatgacatggcattcgacggtcactggcaaaaatctttagagttcatcgctcatgcctacaaggaaaactcctcagtacgtagtgcgattgaaggcgaacggaatattcaaggattctttactgcctacctgagcgtaaatgcttattacctgactgccccggaagtggaactgaatcacggttactgtgacctgttccttatgccggacctactgcattatgaagtgaatcatagctacatcatagagctaaaatacctttcagaaaaagattccgatgcgaaagccgaaatccaatgggaagaagccgttgagcagataaagggatatgcagccgcaccgaaagttcgccaattgatacagaatacaaagttacattgcattgtgatgcaattccgtggctgggaactccaacgaatggaagaagtaattcaaccacatataaaatgacagcacttttgccctcacgctctcattttcgcctcaatccccctattcatcggagttacagcgattagagatccaatggtagcagcgtgagagcaaccgtttgccctcacgttactaccaattattctattttcagcaaatgataaagtgtccccttaccggacttccggcagggaatattcagcttctgaagcgcacggccgaacacagctaccttattgatagccaacctgtcccgtgtcttcgtctgcaaataattcagaatctgcatggacgtcatccattcgcctccctcctcttcttccgccggacggagataacaatggaacaactgttccaacgggctcgcctgctcaaattcacggttcgtctgcttcaaaatcttttcatcctcatcatccagccagtaacgctcacccttataaatggcttccatcgcctgagcataaagctgtttgtaattgatggtagcattggttttgataggagctatcacctcaatacagataaaacgacggctgccactgggatcggcaagcaaatctttctgattgctggtgccgataaaggaagcataacgacgcatttcacgaatagtattgccatgaggcttgcgcaagttagcaacaggcttttgcaacaaatgcttcagaaacccctgctggctgacattgatctgatcaaactcatcaatgttgatcagaaaaaaacgtcctaaataacgctccgcttcctgcttactcttgaaatcaatactgtccgtatagccgaaacgcaactcaggcggcagaataatccggcaaaacgttgacttacgatacccttgcggaccgacaagcaaaggtgacgtactgtttccatgctgccgatccacccctctccaatgcgccaccatgctcagaaaccaacgataaaacaactcctgccagtacggattcgtacaaggaaccaatcctgccaatgcacggatacggtctttcccgtcccaacggccgacatcataaagatattcttctacaggattgtgcaaaggaacatattccgaattcagaaaacggtctacatcacgatcccaggcattgatgccttctttcaaggcacagatagagatactgttgcgcacacgtttgtccacgggcttaaagtaaaagtggatggaatcacgctggcggtattccagatcatctaacacggtgttataacgaaattcataacgacggttcataaattcttccagcagaaaagccgtctcctgctcccttccgatactgtttttcttgccaaaacccttacattcctgataaagattatgaatcgtcgagcgtatgattcgctcatcctcttcccgatagtaatgaatgagtgtctgccggaccgcttcttcttcggggatacccgctttgaaacaatgctcggcaaggtgtacaagcaaaggttgcaaatcatctccacgcttccagtcttccatttcctgaaatgccctgttcaacgccgcttcataaatcttcgtgaaagtttttgcagactcatatcccggtttcaatcgcaacaacagattcttttcaccctgcttgcgctgccggaaagtttcttcaccgggcatagcgagcggttgttccagacagaacggcactgcatcgggattgtaatatggagattcgtccagtgtcatgcgacacttctgtgtcagcaccggtgcttgcagattaatatcataaggaagcatcggctggtagcactttaccgccagccagtaggcatgagcatgaaataattccgcttccgcttctttttcgggcagtcctctgtcatccggcagggcaaaacgcacccatatcttcacgctacggccactggaaccacagaatgcggcaaaagtctggggtaaaagcgccgcctgccgtttcacatattccatttcggacgggcctgccagccgtttcacttccaactgtaccagtccgttatattgtttcatttttcgttcaccttctttagtgcgggtatattctacggcagaatagatatatggcagtttgtctatatgttcgtactggctgtacgtaccttccagcatcggtatcaggtttcgcaaagccgtaatgtgtcccgattttgtctccgttttcattttgttgaataatgtacctgcttcacatatgcttagagcttcttttccactctcgctgtcttgtctgattaaagttattttcattcttttttgtctgtttatctaccaatattgtttatcgcttaattcttgtaaaggtacgatattatattacggcatacaaacttttcctctaataaaaacagactttttgctcgcattaaccttataataaaatacgacatcaatcacacgtagatggttcatttcttaccatgatttccctatatcattgtatctgaatggcttacagtttcctttaatttcttattttggaaacgagcgttccctatatcggaaacgctcgtttcctgccttggaactggcgttcccttataagggaacgccagtttcccaagcaggaaactggcgcttgacttatatgattggattgatttgaccgcatgaaatgtttcaatcaacctgatctttcaggaagcattcaatcatatatcggtcaataatgcgtgagttatcagctattaacacctgatttctcagctattaatggctgaaatgccaatcgttaatagttgacacttcagacattaatactctgtaaatcaaataatagcagcaaaaaacaacatataatgcgacgaaactgagtgagagcaaccgtttgctctcatacttgccaccacacttgctaccacgcccgaaaccacgatgaataaagggatacagacagactgttagagcgtgagggcaaaagtcgtgttgaattcctatggagcgtaaatttgagtatgagttttatttagtccgataccttaaattatcaaacaggcgttctatcaatcgtctgtcttttacaataatatcggcagttcctcccaactcatatttaaagtcgagagtctcttcataattagttgttaatccgttgggcaattcaacgttaatcaaatatgtttcaatggtcttttctcctgttttctgcgtttgggtgaccaaagaaatagaagatacatatccctctatatatccatactccatgtagggatagttctctaacttaataacgactttactgttttcttttacctttccggctccattggccggaagcagcacctgaccatatatatggttttccttgggtatcactccaaataccgcttctcctgcctgcacaaattgaccatctgaaataaatttcaggaactctacttttccatcaaaaggagctttgaaaacatatttctgttcccatgcggccatatttgctatcaagttctgatgagtggacaaaagttccactttcagttcccgttctttctccagttgttccacttccagttgctccagccgatggtatgcttctgtgatttgcatgcgggtcgaggcaatctccctatttatgttttgtacctcctgtactgttgtcaggtaattatttttaatctgatcggtctcatattcataagtcgctatttcctgctgatcaagagagacataacgtttaagccatttccgggcaacatccattctatcttttgcagctttctgcgagtcctccgcttctcggacaatcttctttttccattcaatgcccgttgtgatattctccctttgtttttcgtagacattctgctgcagatagtcacattgagctttcagagctacaagaaaggcatagtattggggttggtttctcctaaatacactttgtcgggaaatgtatccttgagggtgagcagataggtaccgtcgaaatctacccgatctattaaatccgcaatcttccgtacatcctctgtagaagcaggattttgcacgacagctatatattcccccttcttcacttcctcctgtgccttgtgcgaaagaagcagcaagttacccgtactgtttcatcatattcctaacggtaatctaatatgcattacttcaaaacaatttagagcacatgcatttagtcgacattataattgcatactatcaaaagacagtaattttattgcatacgtatctgtgcctcccatattctgcggggataaagattctatttatgctgactttagttttaaaacaggatttatgattgaaatgaatacttatcatttaacccatattaaagcggacttccttaaaaatacaggaaaacgagtcgcttttttatctaaattacctataacttataagtcttccaaatatgcccgtgaatccttcaatgcagatactgttatcacataccctttaaaaatgtgggaaaaatatgaaaataaatatactcattgcttggtcatattaattcaaaaacgatatcgtggttgtatccctctttattgcttatacactgacgaaggagctaagaaactcaaccactatatcaaatcattacaaaaggtgttttggtatagaaatccgaaagattatatcgaagtaatagatcctgtcccagagacagataatatatttattttgccaaagcgaaatgaatcagataccgtacgtatagttggtcaattatgaaaaatagaattatatcacttttcatatatttattgcctggtttgatctatgctcaaaataatgcagacgacaaatatgagattatgtctctaaccgacatgttgaatctttttaaggacagtatcaagacgtaccagcaggttataatggtataattgccgaatggttcactggcaaataccttgaatattgatattgagtcaacaagcaatattaaatcattgattgtctatgcaacaatgcgtttttatttctatatttgtagaatcacacaacttaaatttaatgcatatgaaacagaaattagtacgaataggtattagcgggatacagaaacaaaaagagagattttgccttatatttcctgtactattatttatatttatctttcccgcatcatctattgctcaaactatcgcagaagaatataatttcaattttaagggaggagaagaacaaaagtggtcttggataaagaaccaaaccggatgctttacttatattgaatcaatgcaaataaagaaagatgataatatagtttataaaatatcatatactccacctccatcaaaaaataagaatatgatatttattgcatcttgcactatcatgataccagaacagataaatggagatagctgccaagtatctataaaaagtaaaacaagagagataactaatgcatggcttacagttacagctctcaacagtaatgaagtggcagtagcatctgaagacaaaaagctggaacatccggaatggacggataatgtactatcattaaaattgacggacgggaaatataaagccaaagcattacgaattaatatcttttattttggaaatagtaatccggatcaacaaatatgtttaagtgacctgcaaatcaatattgatggaaaagatctggggaaacaatctattgaagatcaaactgtcattaacacaaacattcacaaaagacttatcaaaaataagattataaaattatctcatgacaatgatagtactctgcttacgcgaataaatgaattgaaagataaaaaaatcataggattaggagaatgtactcatggttcgcaagaattaaaaactgcggttattcaattttcaaagaatctcattcaaaatggagattgcaggtttgttctgttagaggctcccgttgatgccttactactggtcgatgcatatatacaaggaattatatcatcacccgacattgaaaaacaaataaaagaaatcatgcagatgttttttacaaacaatagcgagcttatgggctttgtggattggttaaaggagtataacaagacatctcttcgtaaagtacacctatctggtatggattataaagacatcataagtccatatttttatgactacctattaaatctattggataaagaaaaagggcgatactatttattaaaactatatgataaagaatttaaagatatattgcaatatgctcatgaggatgtttatttaaaaacgaagttgggagaagagaatttttcgctttttacccaatacatagaaacttgtatcaatttgggtattggctcccaattgcctcctcctgattatagggatttctatatgtttacttataccaaacaacttgctgatcatttcttaaaaaaagatgagaagctaatcattcacgctcatagtgcccatctttctaacttggaacgttttgatagttttccgtataaagaaatcccagcagggaatcgtttaaagaaatattatggagataagtattactcaattggttttcaagttggaaaaggaacatttactcaggaatccgccggttattttagcaagctgatagcattaccattatccaagccaccatataatagttttgaacatttagctctaagcacaaaagaaagttatttctattatccatccaaatatatggatgacggtattgttgagttattagttattccaagaatggcacgttatcagagacaatatcaatttcattctgtgaaaaactggtgtgatgcctatgtctttatacaagagagcacgccgctcaaaaatgtaacgactggagaattcgaaacaatgttcaaacaatttcttagaataaaggagttgataaaagaattgaaagcaaacgaagaaaagataagaaataaagagtaacttctactcaaaagtaaaagctactcttcattccatataagattggggatattcagtaagtttccctatttatttgctttaatacgttgcccgtccgcctgaacagcgtacagttccgctccttcaatgtctgcttcggcaggtacagtaaatacaaaccgattggcaaaccatacttttttgccatccttgattaattcgaaagcaaccgcctgttcgccattagtcacagtgtatgttcttccggaaacggtataacttacagtcttggtgattttcacattgttctggaatgtttcgaaataccctacatctcctccatcttcggatatacctttttgattgcctccggctcctgcctggtatcttcggtcttcaatgtattcaataggcggacatttagtggggaatgttttcatataagccagcgtctgattaatcatatcctgtgtcacggtatatgaaaagcttccgtaagcatacaacttgaaactgaccggaataaagaatccccaggcatcgaagaattcggtcatatccatattagcggcttttgctacgttgcgtgcatacatcagctgtgctgcgcccggatcattgaaaggtaaccaaaattcaggggtacgtccttgttcgaatatcttacggatggtattcggtttcttgccgatacgttcgaaatatgtccacaattgctggttgaggcgcatatgcatttcggaggcttctccttgatataatccatatttattggcatcatcagatgtcatgtcctgaggggtaaatgccaacgtgttcgggtcgcgcggatgcatgaatctgctccaaggagtcggaggcgcataccggtaagtagctaaagtcccaatggagcttccacgtgatccccactggtttatcttgtacaccacataattagaaaagagattattgctcgattccgtagtactgggccagttgatagctccctgatgcatgtgtccgagttcatgtcccggcccccattcattgtcctgattcttgtccatatcacgcggatcgaagttgtttttgaaaccccatccatcttttgtgcttacatcacccgctgccatattaatgtaataattggtagcataaagtccgtcggtgaaagtcgtgacatgcatcagtgaattgaattctcctgtattcgaataagtatcgatggcagccagttcctgctcccaatctatcaggttatcccatcgttccattcctcttactactccatactgtttgaagttgtcctgattttgcagcaagtctttcagtgctgtaaacagaatcttcctgcctttcaatacaaatacgcatttatcagctccgtccaaagtgacagattttgccttccggatatattcacggaacagatcatcggttttatccacagtcagatcccatacattgaagcctacgcgcgcatgttccgttgtctccacatactggggcggaaaatgtattttcactgccggcatgccacggggatcaagtttctgatagatgacaaacagatttcccgcacgtgaaaatgaaaacttgttgattccgtttttcaggaatcgttcttcaccgtcgggccccagatccgaacaacaccttagtgaaatggattcaccttgcggtatgccgtctgctaaaacgaccatctcttcacccgcattcgttatgataccggtagggttgcaaagaggcgagtagtaattggttctcaatttatctccccaatattcgggcacactgtatgcctgatatgactgtatcctgaatctcttttccgcttcgggataagtattactctgcaaagactttgccagcacattgaagaatgccggaagccgattgatggtttcgtcggaagcgtccgggcggagttcactgcatgaacgatcggtgaatacagttatcagttgttcgtcaagcggattttccgcagcatggaaaaattccatctcgtcgcaactgacgaaatcatttaatccgcttttaactttgaattgaacagccgcaggtacaaccggatcgttcagcaatatcctatggctgcctcctgctcctttaaaatcataatcttgtatatgaacaaaatccgcacttccttgaggcttgatgtaaagttcgaatgctccgaaattaccgttaccatttcgactgtgatacaggatatagtctagcgtaagctgattctgatcgaattgatattcaagagtaacggggaattttgcagattgactccatgtggaatgataacaggttccgccgaactgaccgtcataagacttcgatatatcctgccccggctgatggtcggtgtcgtatccgccggtaactttcaactttacatccttctccggatttacccccgaaatatcactcgatttcttttgttgtttgatttccgactggtcataaatgtttgtattttctttggatacaaacttgatcgtagcattcctttctgtagtcagaggattggaagcaatggagaatattcgtgtactggatgccagatcggctcttgtatcaggtacttctttctcggtaatccagtctttggcttcctccggaatgactacttcatagtctgtattggaaagcaagttgacttctatatgatcgtttcctgttcccgccacctgaatgacatggctctcttcagccacttcaatgatcaggtcaccgcctgtctgcacaactctgagtttagcagtcagcgcattattggtgatagtaatatttccttctctaactcctttttcgggactggatattgccgaaaccgtcagttctgtatccgatgctttccttgccgtcagccattcttttccctcggttaccgatgcattccactcccggttcgatttgacaggtacggctacttccccaccctctttcttgaatccaatggatttctgaacttgcagcaccggctctccctgtagctccttatcatcactcttgcaagcatagagagtagtgactcccaccagcagaataagagagatacatagtatgtgttttaccttatccaataacatagtatttataatttttgttgtttttccatttcgttgaccagactatccaaatcgaagtcaatgttatattcattctctatctgaatctttttgatttgcttcaccagcgaatgcggcttcagccttcggatcatctctatttccagaagcctgttcgggaaacgtttgcgaatgccatcgatgtctttcatataaatactgtctgctccctgataaagcgcattggcggattcttcaagaataaatgctcccaaactgtcaggatattgttcgagcactgcccgcagaatttccagactttttccgaaactttgatgcgcatcagcattcatatctttagccgcctgaaacaatcctaactgaaacaggtattctcctgttatcgcttttctctccattgccaaagtctggacatgcaatgcggaatccagctcccctatctcagccagtagtttagctttggtaccataataatcggggttgagactgtcaatcgacagtgcccggtccagaaggctgatacacttccgggtggaatcgacatcataagacgattgcaggatggcgaccgcctgttgataaaaactgtcggcactgagatttacgggatggggacgaatgtccggtttctgccgtgaatgacaaccgatggctgtgcaaattagcagcaaaacaagtaatatgatattcagtttctttgttttcatgtacatgattctcaatagtcggataatataaataaaaaaaatgactgacagggagttttataggaaaatgtgtctaatctaatcttatttcctccccgccagtcttttcattagtttatcagatgcctaactgctctttggcccaggcttcatcatgccttactctgtagagatacatctcagccatattccaccatgctttattagcgttagtatagtccaatgtggcttgattacggcgacccgtaggagtaaatcggatatagttgtaagcttgtttaccattcacattgtttttagcggtagcatgaccaccgtttgatgtcggtaaattgaactcttccgtacccatgctttcaaagtattcaccgttggtacttccgtaaatagttgcgatcgttacgtcgcccccattatttatgccagtctgacgcgcatcatattcaaaacgaagcccttgcaacggtttgttcagtttaatctgcacgtaatgggcttctgatacgactggatcttgccatctggaatgataataagttccacctttgccgtcaatcaaagcaggtaagccacctccatcaccgtcctgtgtcgcattagcagaaagcatatcaacagtgagaatgacgcgttccaactcggaagcttcgccggaagtacctgtaatgattacaggactctcagtctccattcccgtaggaccgtaggtcttgaaagtaaaggaatattcaccagcacactgataggtatcatctatgatagccgatgttgtcttgaatccatctatttctatctctttattttcttttgtgaccttatcataatacgtgattttcactttactataatccacatcttccggtgcttcccattgcagagtgatgtgtccggctcccggtgtagcggtagcattcaccacatttacaggaggaacgggaacgaatcctgcttgtttcacagtaactgtaaagctgtttggatcaaccggatctttacttgtgaacgttatcgttccttcacggggttgttctacaactgcggtgttaggctctatgatgaagctttcggaagcatcacgcaatgctcctctggtgagcggtgcagttgcaggcttaatccatgtttgagcattttcgtcaatcacatattcatattccgcacccgcaggaccgttcactttgaaaggaatcgtgatcgtttcgcccattgctttcacttcaaagaccttgtgtgcatcgtcaatgtcaacaatatatcctctcggctgctgcttgataatgaacgtgccgacacagttgtaattctgtgacgactgaagggtgattgtacaatacctcacaatggtatcagtattctgatccaaactgaataccagatttttcttgacgatatcttccgcttttacagctttttgtcctttctttgctttcagttctttcggttcgttaaagcgtacccagttacaggtatccggtacagtgatgacatccagattcagattggtattcacctggatagaaagtgaagtcgctttagcatccaccgccttcattccatcatccgtcaatccgggtatatcgatcaccggttccaagccgaactgtttcacacttatggaataactctggtgaccgtatgctatcgtaacttctgctatacgctgtttatagccttcattctgatcggcagaaaccgtgactttaccttcctgcttttgtagtttgcaccattcggcattcgaacttaccgtccagttatcgagcgccacgttggtctccacttctatctcatgttcgccgccggaaagcggaaaaacaacagccgcctggctctcgctgggaatggtcaatgtcagtacattgaactcagtttcataatcaggaccacaggaagagagagctacgaaagttcccaggattcctgtcagtccgatgattagtatattttttttcatattattagatgcattacaagttttctactcttggattgaattggtatctcagtttggcatttacctccctgtagaggtcggtagacttcaaacggtatttgtaatggaggcggaactccttataataagtggagcgtccgtcgggcgtccggatgacattcaataaatacgtattgtcatattcgccgatgggtgtgagctgcactacgtcgatgctttgatacggcaggatagtgagttccttcgccaacggattctcgggcaactgtgctcccatttccagaatgatgctccccttattgatgatatccagcgcagtggtatagtcagtgaaattttcatcaccggccatcaaacgtacagagttctcagagataggaaatacacggttggaattggtcggacggcgaacttcactatacccatccggattcgggataatgaccgtactactggtgtaattgtagtaagttgccgtctgcgtggacgcatagtaattctccttgtggatacgaagcagcacgtgcctctttttcggattacagtccggtgttctcaatgaatctatcttatattcgagaaaatagatggagtcgggtgaaatcttttccagatttttcagatacaccggaaacatagccttggaagagccggcggaaatgttcatttccatcgtcggaaattcatagcattcttccggcaagtactttgcaaaacgggctttattgatatcaaaattggatttgttgtaagccctcaacagtgtatcggaatgttgcagcaccactgttaccggttcgtcggtagcctgcgatccactcaacgaagctaccacgaaaagggtatctcctccctgctgcaactcagctacctggcgatcatataccaagttggaattactgagtaaatttacttctttgcggaactgttcctgatcgaaatcatacttatcgcaaccacttatcataaccaaagcagagcaaagaattatagttaatatctttttcatattatctttctgttattcttgtttttcattatctgtcccatcccggattctggtccatggaaggtactttcagtaattcagagtgactgatcggcataaataccattttgggcagtgcgacgcgatcgcggatattctgttggtcaatggtcacgatgttccagaatcccggattgccggcgacgtccgtacggtctttttgtacatccaatccctgccagttagacgtattggcatcctcggtaaggtaagtaccccatctacgggtatcgaaatagcggtagccttcgttgaaaagttccacttgtcgttcattacggatgatctgctcaaatctctccacctcgttgaagtcacccaaagccggaccgggtaatccgacacgatagcggatcatattgaagtatttagccatttcctgaatatcacggctgacagtcacttcgacatccgtacctgtcatatcaggagtagtaacggtgaccgtacccgtcacccggttcaacgcttctacatattcaaggagtacttcggcataacggatgatggcaaacggtttaggctgagtaacaaatgcgcctttcacacttccttttccgctcgaccatgaatcgtcaggatggacaaacttgacgggagtgtagccgctgatattgtaatcattgacgttatttcccgcaccggccaacccggcttgcgtatcatcatgagaataccagaactgctggttgacataggttgcgtcggaagaagcggaactcatagtccacaagcgtccgggaaatccgatggaagcatagaaacgtgccgaacggttgtcatacatcttcggaacatcacctctcaactgatagtttcccagcactttattcgtacctattgtctggctgagatccgctacatacggatagtctgccgatgcattgtggatgtctctgccatccatcatcaggaagcaatcgaccactctctgaggtacggacatgccgccccagcctccgaatttaacagggaacgagtggtgcgtgtaattagtcacattttgggatgccattgcccagataaactctttattggtttgaataataccttcaccgttgaacatatcggcaaaagaatggtaagggtcgataccacccgcaccatcggggaaaggagccgtaggaacattatctgccaacggataagggtattgattgtccggtgccactgtgaacagtgaatagtattccatattgatcacttgctttgcggcagcggctgctaccgcccaacggtcgggatcataagtctggtttacgtaatcggcaccgtcgcttttgcgcttccaattgctaaagcacaggcgggcggcatcaccgccattgaacaacggagaagcttggaacaggcgcagacgggcaatcaacgctaaagctgcccccttggtaggacggtcggaatagctgatactctgctcggtcggtccataaataccttgtgtggcaagcttgaattcattgcaaatataatccaccgattcatcgtatgtagaccgttccctgtcatagtattccgcagattcggaagtacctagtacttcgtctccgacaatgagcaacggaccgtagttcatcagtaaatggtagtaggcataaccgcgcataaagtgtacgtatccgatgtaacgtcttctgtcggcttctgtcatatcagacactttatcgatattttccagcatccggttacatcttgccactactacatacatgctataccatatatcctgccgcaggtttcttccgttgacagtaccaacactgaattgcgctccccaaaactcgttggtctgccatctgacggcaatctcgtccgaggcagtttctcccggattccatgagtttccccaaatggcacccgcatcgggaaaacgggtcggggtgttccaaaggtatccttcggcatttttcatgctgtggaaaatggaatcttccttgaatgtagcctgaaaataattgtctacatccagaaaattgcaggaactgagcagcaaagaactgccgatcacggctcccaaaagtattttaattcgatttttcataaatttttcaatgttatgtgattagaatcttaagtatacctggaatgaataggtagcaggtatcggatagacagcaccatttgccgatgcttgttcgggatcgaaatatttcacattgtcgaaagtgcacaggttattcgccacaaattccagatcgacggaagacaatcctaccgctttaatccatggcagatgtttcaggctgtatcgcaagctaacttcctgaaggcgcaggaaagaaccgttccgcctccagaaggaggacaattgagaattgttcttattacctccgtaagagagacgtggaaattcagcattcggattttccgtttcagtagttcccgaataccatgcgggcgtccatctgttcttgggattgttggctagtttgatcacatttcccaagtctccattatagaacggaatccatccgttgtcgtttccaagccctgcacgatagtagtctaccttggcggaacctttgaacaagacactaacagtcagatctttccactggaagtcaccaccgaatccatacatcactcttggtaactggttggaataagacaatggcaccttatcgtcttcattgataataccatcgccgttgacatcgcgatatttgatgtcgcccgggcgtatctttccgaatccgctttgatcggggctggtattgatctcatctttgctggcgaatagtccctcggagatatatccgcgtaagatgttaaagggtctgccggtcacactgagatagtcgtaaggtaatttattctcttcaaaatagtcgatgatattttgtgagaatgtataattggcacgaaccgtaaaactcatatccttattaatagtatggaaaaactcaatatttccgtccgatcctacactgtgcatacgtccgacattcgacttcggataagtcaccatacctacgtaagaaggtaacgtcacacggtcctggaagatgtggtcacgagtatcccggaatatgtcgactgtcagggacaacttgtcgtgaaagaacttggcatcgataccaagattcgccttctttgctacttcccatttcaaattgtcggctccggtatgggtttctgtgatacccgcataacgatatccccaagcagatccggcatgattgtctatcagggtcaggtaagggaagcgtccctggccggtataatcgttggtagaaacaatctggtcgttacctacgataccgtaagagccgcgaattttgaggaacgtaaaccaaggtagtttctctgtccaccatgcataagaggaaggaacccatcctgcggcaatggaaggaaagaaaccgaactgttctccttttttgaactgtgcagaacctgtataaccgaaattcgcatcgatgaaataacggtttttatagtcataggagatacgtccggaaaggttctgatggcgtttggggatgctggcgatacctaaatcatcatatttgccccatagagagtttttctcatctttcatatagtattcgagcaacgcgccaaaggtatggtctccgaacgaccggttccagttggctttcgcctccatatagtattgcctgtaagagttttcgccacttccgtatgccatacttgattgtgctgagcgcagcgctttaatcaagactccctgtgcggttcgtccggtagcacggtagaggtcgggccaaatcctgcggtattcgctgaagtagccgatatgttccgtcatcgcttgtaccgacatcgtcagtcctttcagaaatcctccgaattcttgcgtcagcttcagcgtcagcatgtttcggttgtcctcgctttgcatgtatccggtattattcagcataacatatggagaagccaattcacgtgatccgccatatacgggcagcgtgccgtcagagtaagtgaccggaaacagaaggggggtcaactgctggacggctgaccataccagatctgtgttccctccgcccggactgacataagaattgacatatccatctacaccgaagtatagctgggtcgtcttggtcaaattcatatcgatattggcacgataattcagcttgtttacgctcaatggctttttaaacagattttcctcttggcgataggcggctccttcatcctgataccccagcgacaagaagtatctggcaacgtcacctcctcctttagcactgacatagtagttctgctgaatagaattccttttcatgatttcatctatccagtttacatccggataaagatccgggtccagcctgtttttgatcagatccagttcaagacgggtgtacagatcgtcttccccagacatcgctctggcttcattggcaaggagtgcgtaatcatatgctcccaggtattcgggcagacgtttgatatgtgatattttcatcgtagcacgtccggtcacctctaattttccactggtaccacgtttggtagtcaccaataccacgccatttgctccgcgtgttccgtagacagccgttgctgcggcatctttcaggatactgaacgattcaacgtcgtcggtatcaatatcttccaatcttccttcgagaccatcgatcagtactaaggctccactgctggctccgaaagtactgataccgcgaatccagaagttggagatatttttgcccggttcacccgaactctgcatagtgataacacctgccattcgacctccgatcatattattgagggaagtggcgggagtttttagctgcgcaacgtcaatggtggtgatggcacctaccacagatacttttttctgggaactcatacccgttaccactacttcgtcaatcttagtctcgtcttctttcatgacgatcttaagcttttcttcgtttttggtaatcagcatctcgacattcttcatacccactgactggaatatcagtgtagcgtttttcgttacttttatcttgaactttccgtccagatccgctactacgccgactcccggttcgttctttacataaacagccgtacctaccaatggctcgccggttgcatccacaatcacgcctgccactgtaaactgtgtactcgtttcgttctgactgtagcctgccaatggaatcaatgtcataagcagtacaatcaataaaagattttttttcatatatgtattatcaaaggttattgtatagacaatttacgaatcactttatttccggtatctgcgacatatacaatttgtccgtcggcactaacagctacaccgaacggatgattgaacaacgcgatatccggaccgccgtctttatagcccttcatgcccggaagtccgataggagtagttaccatagctctatccaagggcaatttggtatcgattactcgtatacaattgttaccacaatcagcgatatacaatttaccgtcttcggtaaagcagatttgatggggattatcaaacttggcattcctcagcaaaccgtcttcccatcctgctcctgctacctgtccttccaatatggcctttccggcataaccttcaccgggataggtgtttttgtctttaccttccagatttcccacatccactcgccatatctgatttccttctgccatcgcgacataaagcatattttcctgtcctttgacagggctgaaagcaaggtatgagtcacatgcatcaggtctggtagaagttccgactttcttgagtaggagttcacaagtacgggtgttcggttttatccgcaccagttgtcccttaaccatcactgtataaatgtaatgatccagcttattcactacaaagcagtgcttatagttaccatcggcaacgtctttagtttcatcattcagcagcaccgtcaggcggcgcggcgcatagctcacgcttttggccaaagaataatatcccataccgccatcttcaggagcgtacatcgtaccatccaggtccgaaaaagcaggagcattcaggatggctgacgtaccatactgaagtaccagcacagaattactcttaatggaagccatgacaatatttccgttagactgcgctcctttatcattttgacaggttacagatggataattgtttcctccgtgccatacgtggcgttcggtgataaagatattatcctcgtcatccagactaatgtagttgggcgccgacaatgtagaagtagcgatgtctcctcctaccgtaggctggttagcgtccggcgaagcttgtcctacaacggtagtcacgctcgtctgcgtcttgtagataaattgccttccggcttgtccttcatattctgttccgtcgggcattgttcgggcaacaagaagattcatttctttcttgtacgtcagtcccgaaggaacatacaagtagattttgttaccatttgaactcaccaagcccgcctggtgctttatcccatccgcatcttcgaaataaactttcagattggtagtgtctgatccgaagttgctgccttcgacgatcataggggtagcgatcccaccggaatccggataaaatccggtcacctcaataggttgatccggattgaatactgcacttcctatattcttactatccgaacatgaagtcagatagacaaatacggcggcaaaaaatgtcaaaaaaatagttcttttttgcattgtttttctgtgattaaaggttaataattagttgggttaatatggataagtagaaaacttactattctatatctaggcattatgataatgtggtagaaataagatgtgcatttttactctaatacgtttgtttttgggtgtgtatgctttatcttaatatttagtaagtttaggaatatatatagttgtgtttgactgttatcattcatttgtttttcttgggggtattgaaatttttaatgaattcaatctctcttcagcactgttctgatctatgctgaagaaacgataataaaaatttaatcactgcccggaggcggcctacaatttcgcattatcataaataattattaagaaatatagtcgtaattgaccgattagaataagtcgctctagaacttggtaatcaaaacaataaaatcatgataatcaataatatacatcaataaaaagattatatctatcttattacgatctgagtagtagaatgaaaaatcaaaaaaaataccgtttgccgataattaaaataaaaaaaacattgcgtttaccaattttattaataactttacaccgtcttaagtggcacacaaacttaataacctttgaaaagcctatgaaaacaggaaaaaatacacttattggtataaaattaccaagttctagagcaacttatcccaatctgttaaatataaaaatgaatcataacagccaagcacaactatatatattcctaaacttactaaataaaaaaggtagtagatccccaaaagaataaatgcataagaaataaaatgcacaccttaatttctaccatatataataatattttctccttcaccaacaatctctggcgaataggccgtaataagaagtaaaggctatattacataaaaaaaattccagtaacttgcgatactggaattttatataaatcaagaaaatctcttattcccactcaatagttgcaggtggcttagaactgatatcataggttacgcggtttacacctttcaccttattaataatatcattcgaaatcttacccaggaattcatatggcaaatgcgcccagtcggcagtcatggcatcagtagaagtcacggcacgcaatgctaccgctctttcataagtacgttcatctcccatgacacctacagactgtaccggcagtaagataacgcctgcctgccatacttgatcatacaatccccagtcgcgcaatccctgaatgtaaatatcatcagcatcttgcaggatacgcactttctcacgggtgatgtctccaagaatacgtacagccaaacccgggccagggaatggatgacgagtaatcagatgttccggcatacccaactcgcgacctacacgacgaacttcatccttaaacaacagacgaagcggctcgcacaacttcaagtgcattttttcgggcagaccacctacgttatgatgactcttgatcactgtacctgttatagacaatgattcgatgcagtctggataaatagtgccctgagccagccatttcacatcttttattttgtgagcttccacatcgaatacatcgataaagcccttaccgataatcttacgtttacgctccggttccgtcacacctgcaagctctgcaaagaacttttcgctggcatccacgccaattacattcagcccgaggcattcgtaatcgttcatcacattcttgaactcattcttacggagcataccgtggtctacgaagatacaagtcagattcttaccgatagctctattcagcaaaacagcagcaaccgatgaatctacaccaccgctcaatcccagcaccactttatcatcacctaactgagctttcaactcagcaaccgtactctcgatgaaagaagccggtgaccagtcttgcttgcatccgcaaacatcaactacgaaattcctcaatatctgcgtcccgtcttcgctatggaacacttccggatggaactgaacgccccataccttctcaccctcaacctgataagcagcgatatccactttatcagttgaagcaatcttcttaaaattatcagggatagcagtgattgtatcaccatgactcatccatacctgcgtattctcacgaactcctttaaacagcacattatccttgcagaaagaagtcagatgtgcacggccatattcacgtgtaccggccggttctacttttccattgttagtatacgccataaactgtgcaccatagcagatacccaaaataggatatttaccacgaatctcactcaagtctactttgaaggcatctttatcataaaccgaaaaaggacttccggaaaggatgactcctttaattgtcggatcttctttaggaaacttgttataaggaacaatttcgcaatacgtgtccagttcgcgtacgcgacgaccaatcagctgtgttgtctgcgaaccgaaatcaagaattattattttctcctgcatatcaatggttggattttgaataaatgatttgcaaaagtagaaaaaagtaggcaaaaagatagaagaataaacagaaaaatcgaaatttacgagagaaatatatcatcggacaacataaaatccgaaaagggaaacgatgtcagagagacttatatataataaataggagactcaaaacagaatctcctattttattatacaagtacttatttcttctctttcagcaagtcacgaatctcagtcagcaacacctcttctttagtaggagcaggtggtgcaggaggagcagccggggcttcctctgccgccttcttcgtagtcagtttagtgatcagacgtataaataggaatatagcaaaagctataatcagaaagtcaaaagttgcttgcagaaattgtccgtaatccagagatacggcaggagcaatctccttaccgtctgctccaacttcagccgctttcattacccatttcagatctgtaaagttcacaccaccaaccaataagcctattgggggcataataacattcgccaccagtgacgatacgatcttcccaaacgcgccgccgataactacaccgacagccatgtcaatgacgttccctttcatagcaaacgccttaaagtcttgtaaaaatgtgctctttcccatcttttttcaatatttaatgtgaatttaatatgcgaatataaaaacatttttgtaattttgcaccgcatttgaaaataaaacaaatgcgcgagctgagagatatttgaacaaatattataaaacccttaaaagtttaaacaaaatgattaaagtaggtattaatggattcggacgtatcggacgtttcgttttccgcgctgcaatgaaaagaaacgatattcaaatcgtaggtatcaacgacctttgcccggtagactacttggcttacatgctgaagtatgacacaatgcacggtcaattcgacggtactatcgaagcagatgttgaaaacagcaaattgatcgttaacggtcaggctatccgcatcactgcagaaagaaatccggctgacttgaaatgggatgctgtaggtgctgaatacgttgttgaatctacaggtttgttcttgagcaaagacaaagctcaggctcatatcgaagctggtgcaaaatatgttgtaatgtcagctccttctaaagatgacactccgatgttcgtttgcggtgtaaacgaaaaaacatacgtgaaaggtactcagttcgtttctaacgcttcttgtactactaactgtctggctcctatcgctaaagtattgaacgacaagttcggtatccttgacggtttgatgactacagttcactctacaactgctactcagaaaacagttgacggtccttctatgaaagactggagaggtggtcgtgctgcttctggcaacatcatcccttcttctactggtgctgctaaagctgtaggtaaagtaatcccggctttgaacggtaaactgactggtatgtctatgcgtgttccgactttggacgtttctgtagttgacttgactgttaacttggctaaaccggctacttacgctgaaatctgcgctgcaatgaaagaagcttctgaaggcgaattgaagggtattctgggttacactgaagatgcagtagtttcttctgacttcttgggtgacactcgtacttctatcttcgatgctaaagctggtatcgctttgactgacactttcgtaaaagttgtatcttggtatgacaacgaaatcggttactctaacaaagttcttgacttgatcgctcacatggcatcagttaacgcttaattagaaatctaaacatataggaaaccgctgcggaaaaccgtagcggtttttttgtcttcattttatatattgttaaaaagcaaggtattatccgtggtataacctacaattttagtagttttgtacttctatgaagagaattatgaagagattattaataacattgatactagtttacaccatgaacaatatactgaacgctcagaatcctttcttcggtcagtatcagacaccgcatgggactgtgccctttgaccggatcaagacagagcattatgagcctgccatcctcgaaggaatcaaacaacagaatgcggaacttgatgcgatcatacaaaacccggagaaggcgacatttacaaatacaatagaagcctacgaacaatccggaaggctgctggacaaagtaactgccgtattcggcaatatgcttagtgctgaaaccaatgacgacttacaggcattggctcagaaaatcatgccactactcagcgaacacagcaacaacatcacactgaatgagaagttgtttgcccgcgtgaaagaagtgtacggacaaaaacaatctctgcaactgacccaggaacagaatcgcctgctagacgatatatacgacagttttgtacgccacggtgccaacctcgaaggagaagcccgtgaacaataccgacaactgaccaacgaactgagcaaactgacactcgacttcagcgaaaacaacctgaaggagacaaacaggtatcaaatgcttctgacagacaaagccagcattgccggactgccggaaatcatcgtagaagctgctgccgaaacagccagaagtgaggataaagaaggatgggctttcaccctgcacgctccaagttatgtgcctttcatgacttatgccgacaaccgcgagttgcgccataagctctacatcgcatataatacaaagtgtacacacgataacgaattcaacaatatcgaaatcgtaaagaagctggttaatacacgcatgaaaatagcccagctactaggatataaagattatgcggaatataccctcaaaaaacgaatggctgaaaacagcgatgccgtatataagctgctcaaccaactattggaagcctacactcccaccgcacagaaagaatatctcgaagtacaggaactggcacgtgaggaacaaggtgatgacttcattgtcatgccctgggactggagctactattccaataagctgaaaaacaagaaattcaatatcaatgaagaaatgctccgtccttacttcgaactggaacaagtaaaaaaaggagtattcggactggcagaaagactctacggaatcactttccggaaaaatacggaaatcccggtttatcacaaagatgttgaagcctacgaggtattcgacaaagacggtaagttcctgtccgtactgtacactgacttccatccccgtcccggaaaacgcgccggagcctggatgaccagctacaaggaacaatggatagatcccgtaaccggtgaagacagccgaccgcatatatctgtagtgatgaacttcaccaagccaaccgaaagcaaacctgctttgctgactttcaacgaagtggagacattcctgcatgagttcgggcacagcctgcatggcatgtttgccaactcaacctatcagagcctaagcggaacaaacgtatattgggactttgtggaacttccttcacagatcatggaaaactttgccatcgagaaagaatttcttaatacctttgcccgtcattatgaaaccggagaagtgcttccggacgaactgatacagagactcgtggatgcttcgaatttcaatgcagcctatgcctgcctgagacaagtgagcttcgggctgctcgatatggcatggtacacccgcaacactcctttcgagggcgatgtaaaagcctatgaacaggaagcctggaaagacgcacaagtattgccgatagtcaaagaagcctgcatgagtacacaattctcccatatctttgccggaggatattccgcaggatattacagttataaatgggcagaagtgctggatgcggatgcattctcactgttcaaacagcaaggaatcttcaaccgtgaagtagcagattcgttccgcaacaatatcctgtcgaaaggaggtacagaacacccgatgttgctctacaagcgcttccgcgggcaggagcctaccattgacgcattgctgatccgaaacggcataaagaaacaatacaattaaaaaaggagagaattggacatgaagaagagattgatacttaaagtattaggattgctgttattgcttccgatgttttccggatgtaatgatacggatgatgtagccggcatcttcaccggcaagacatggaaactgacttatatcacagtcaaagatagccatcaaatgtttaatttttggggaaacgacaacaaagcccgcgaacaaagcatgaaattgcttgacgaaacaggtaggtatgtaattacctttaatggaatggaagaaagcaatatcatcaccgggaccttaagtggcacagtgataacctctactttcactggatcatggtccgccaatggaaaggacaaccaattcaatgcatctatccaaggaggtaatgaatcatcagatatattagcaaagaattttatagaagggctgaacaacgcaacctcttacggaggagatgagcgaaatctatacctttactataaaccttccggtagccagcagacactttctttagtttttcacgttgtaaaataaaagacactctcatggacacggaaaagaaacaattggaactggacaaacgttacatacgtatggcaagcatttgggcggaaaactcttattgccagcgccgtaaggtaggagcgttgatcgtcaaagacaaaatgattatctccgacggatacaatggtactccttcgggcttcgaaaacgtatgcgaggacgagaataacctgacaaaaccttatgttctccatgcggaagcaaacgctatcaccaagatagcacgctcgaacaacagcagcgatggtgccacgatgtacgtcaccgcctcaccttgtatcgaatgtgcaaagttaatcatacaggcaggaatcaaacgggtagtctactccgaacattaccgcctcgaagatggaatagaactattaaaacgggcaggaatcgaagttatctatacagaaatgaacgaagattcttctccaaacaaataataagacgaacgttttaaaaaaaggaatagacatgagtacaagaaactcttcacgttttacgcctatcatcatagctatcagcgtggtggccggtattcttatcggtacattttatgccaagcacttcgccggcaaccgtctgggtatcatcaacggttcttccaacaagctgaatgcgttgttgagaatcgtagacgatcaatatgtagacaccgtaaacatgaccgacctcgtggagaaggctatgccgcagatcctggcagaactggacccgcactccacttacatccctgcacagaatctcgaagaagtcaattcggaactggaaggcagtttcagcggaatcggtatccagtttacgatacagaatgatacgattcatgtgaatgccgttatacagggaggcccatctgaaaaagtgggactcatggcgggagaccgtatcgttaatgtagacgacagtttatttgtaggcaagaagctgaacaacgaactagccatgcgcacactgaaaggtcctaagggatcgcaggtgaaactgggtgtcaaacgcgtaggagaaccgaaattgctggacttcaccatcacccgcggagacattcctcaaaatacagtagacgctgcctatatgctgaacgatgatatcggttatgtaaaagtcagcaaattcggacggacaagccacgtagaattgcttaacgccttggctcagctcaatcataagaaatgtaaaggactgattattgaccttcgcggcaatacaggaggatacatggaagctgccatccgcatggtgaatgaattcctgcccgaaggtaaactgattgtatatacacaaggacgtaaatatccccgtgcggaagaatttgccaacggtacgggcagttgccagaaaatgccactcgttgtattgattgacgagggttctgcttctgccagcgaaatctttaccggagcaattcaggataatgatcgcggtacagtggtaggacgccgttccttcggaaaaggactggtacaacaaccgattgacttcagcgacggctctgctatccgcctgactatcgcccgctattatactccttcagggcgttgcatccaacgtccttacgaaagtggtaaagacaagaattatgaactagacatatacaaccgctacgaacacggtgagttcttctcacgcgacagcatcaagctgaacgaaaacgaacgctatctcaccagcctgggacgcactgtttatggtggtggcggtatcatgccggacgtatttgtaccacaagatactaccggagtcacttcttatctctcatcagtaatcaaccgcggactaactcttcagtttactttccagtacacggacaataaccggaagaaactgagccagtatgaaacggaagaagacctgctgaattatcttcgtcaccaaggtttggtagagcagttcatccgctttgccgactcgaaaggtgtaaagagaaggaatattctgatccagaaatcgtataaacgactggaagcgaatatatacggcaacattatctataatatgctgggactggaagcttatctgaaatacttcaataaatcggatgctacagtacaacaaggtatagaactgctcgaaaagggagaagctttcccaaaagcacccgccgagacagaagaggaagtgacgaaagataataaagatggaaagaaaaaaagaactgcgcaagcttatggcatcactgaagatccgacacgcatcttcgactttgcagaagcttcaatcagctaaaatacttgccgccctcgaagcccacccggctttcagggcggcaactactgtattgctctaccattcgctcaaagatgaagtagacacgcatgcgtttatccggaaatggagcaatgagaaacggatattgcttccggtagttgtcggtgatgaattggaattacgcctctataccggtcccgaggatatggcaaccggcacttacggtattgaagagcctgttggagaaacatttacggactatgcagacatagactttattgccgttcccggtgtagctttcgaccggaaaggaaaccggctggggaggggaaaaggctattatgaccgtttgctgccacgtatccccgcagcttataaagcaggcatctgcttcccatttcaaatagtagaagaagttccggcagaagcattcgacatctgcatggacataattataacaagtaatgaggacgaattatcacacccacaccacccgctgcctccatgcgacagggagtgacgaagaatttgttttaagtgccatcaaaggcggctatcaggaacttggtttctctgaccacactccatggaaataccataccgattatgtatccgacatccggatgattcccgaagaactgccggagtatgtagaaagcctccgctcgctacaaaagaaatataaagatcagatcagcattaaaatcggcttggaatgtgaatattttccggagtatattccctggctgaaaggagttatcaaggagtatcagctggattacatcatcttcggcaaccaccatttccatacagatgagaagtttccttatttcgggcgaaatacccatacgttagatatgcttgaactttatgaagagagtgcgattgaaggtatggaaagcggtttgtttgcctatctggcacatcccgacctgttcatgcgttcatatcctgaatttgaccgtcattgtaaacttgtcagcagacatatctgccgaacggccgcccgcctgaacctgcccctggaatataatataggctacgaagattacaacgacgaacatggaataacaaccattccccaccctgatttttgggaaatagcagcgcacgaaggctgcactgccattatcggagtggatgcccacaacaaccaatatctggaaactccgttctactatgaccgggcaaatgagacgctccaaaagctggggatgaaagtgacagacagaattcctttcctcaacgaaaaataatgtttgtgataaccgtagcccctactctctgattcagagtacgcaccaaaagttcccgtcccatcatcagttcctgacgaagggcggcggaagtgagatgtacatacagcgtctggttacggatatagagattactggtatagcttgccgccggtcccaacacctgcggccaggcatccagcaaccgctgctcattgagaggagactccagactctcctgacgcaggtattgctgaatcagttttcctatctgctcggcatcgttacgtttcattgttcagctcccatttcattaattacaccctgatctacgcgaaatactttataatcgctgcctaccttctgcagaatacgatccagatgttcacggttagtatccgtaataaatatctgtccgaagttatcaccagccaccagcttgacaatctgctctacccgcgaagcatccagtttatcaaaaatatcatccaacagcaataaagggacggtctgccccgtacgtttcaagaagtcgaactgtgccagcttcaacgctaccagatacgttttattctgtccctgcgaaccttccttcttgatcggaaagtcgcccaacagcatattcagttcatctttatgaattccccgcaaagagaatcccataatcttatcccgttcccggctttgcttcagaacttccagtaaagaagcatcccgtgcatgcgaatcataagacagccccacctgttctttatcctgggaaataaaagaataaaacgactggaaaataggaataaactcttcgataaacgcctcccgcttgcgaaaaacaatttcacccgcttgcgccatcatctcctcccaaaccaggaacaattcctcttctaccggaaattcactttttaataaggtattacgctgtgccaatgccttattatagcgtatcaatacttccagatattccttatcatactgagagatcacgacgtccataaagcggcgccgttcgtcacttcctccggctatcaactccgaatcggcaggcgaaaccatcactaacggcagaaagccgatatgatcggaaaagcggctatactcctttttattccgtttgaattgctttttcgaacgacgcttcattccgcagtaaatctcctctggtgtgccatcttccgcctcataaaagccctgaataacaaagaaatcctgttcgtgccgaatgttctgcgaatcaatcggattacccgaactcttgcagaaagataaaaagtacactgcatccagcagattcgtctttcccatcccgttctgtccgaagaaacaattcagtttggcggagaatccgatctctacctgttccagattcttatagtttaatatggatatccgtttcagtatcattgtatacgcgttaatttgttcacaaaagtagcaagtttttcgaggttttcgagcgtaaaacaaaaaaagatgcctctaaatttcgtttgtagatataaaaaaactacttttgcgagtcgaattatcaaacgatgaataataacaaaaagaatcatataaaaatggcagaacaaaagaatcagaacgaacatctgaacgtagaagatgcactgacacaatcggaagcatttcttgttaagtacaaaaacgcaatcatcggcggtgttgtagccgtgattatcatcgtagcaggttttatcatgtacaagaacctctatgctgagccacgtgaagaaaaggcacaggctgctcttttcaaaggacaggaatactttgaacaagatgcttatgaacaagcactgaacggtgatagtattggttatgtaggtttcctcaaagttgccgacgaatatagcggaacaaaagccgctaatctggcaaaagcatatgcaggaatctgctacgcacaactgggtaaatatgacgaagcagtaaagatgctcgacggcttcaacggaggcgaccagatggtagctcccgctatcctcggcgcaacaggaaactgctacgcacaactgggtcagctggacaaagccgcttctaccctgctctctgcagcagacaaagctgacaataactcattaagccctatcttcctgatgcaagccggtgaaatcctggtgaaacaaggaaagtatgatgatgccgttaatgcctacactaagatcaaggacaaatacttccagtcttaccaggctatggacatcgacaagtacatcgaacaggctaaattgatgaagaaataatataccttattatatataatagaaggttaggcacggattacacggatttcacggtttttagtacgcacaatatgtactaatgcaattatgcgaagctaccgtgaaatccgtgtaatccgtgcctttttaaaatcatgtatttataacccactttaattactacaattatggcaacagcataccataacttatccgaatacgatttcaactctgtaccaaacgctgaaaacatgaaattcggcatcgtcgtatccgaatggaatttcaatattaccggagccttactgaacggcgcagtcaatacattaaaaaaacatggagtgaaagacgaaaatattctggtgaaaactgtaccgggaagtttcgaactaactttcggcgccaatcaaatgatggaaaattgcgatgtggatgcaattattgcaattggttgcgtaattaaaggagatactccacattttgattatgtttgtatgggagcaactcaaggaattaccgaattaaacgcaactggcgacataccagtcatttacggattaattaccaccaatacaatggagcaagcagaggatcgtgccggtggcaaactgggtaacaaaggagatgaatgtgcaatttctgcaataaaaatgatcgattttgtttggagtttaaataaatagttgtatctttgcaccgcaattgagaaacaaacctcctcaaaagcacaaaagggcaaataccagagtggccaaatggggcagactgtaaatctgctggcttacgccttcggtggttcgaatccatctttgcccacaaaaattgcggaagtagctcagttgatagagcattagccttccaagctgagggtcgcgggtttgagccccgtcttccgctcttcaaagagaagctgagaaattagattctctttttttgtataactttaaacctctaagaacatggaagattctccaacgcaatcacacgtactgcaattggcacacccccctatcccaattgtccgcatcggaatcataggattggggaatcgagggctactcaccctgcaacgttatctgcaaatagaaggaaccgaaatcaaagctctcagcgaaatcagggaaggtaacttgaacaaagcccaactcatactcaaagaagcaaagcaccccgaagccacgggatataccggaccaggcggctggcgaaagatgtgtgaatgcaacgatctggatttaatttttatctgtacagactggctcactcacacccaaatggcaacctatgcaatggaatgcggcaaacatgtagctatcgaagttcctgccgccatgaatatagccgaatgctggcaactggtcgatacagcagaaaagacaagacgccactgtatcatgctggaaaattgctgttatgacccttttgccctgactactctcgaaatggcacgtcaaggtgtactcggagaaataatgcatgtagaaggagcatatattcacgatctccgttccatgtattttgccgaagagagcgaaggcggttaccacaatcactggggaaaaagatacagtatcgaacatacaggcaatccctaccccacccacggactagggcctgcctgtcaaatcctcgacatccaccgcaatgacaggatggaatatctcgtatccatgtccacccatcaggccggcatgagcgagtatgcgcggaaaagattcggagagaactcaccggaagcccgtcaaaagtataaactgggagatgtcaacaccacgcttatccataccgccaaagggaaaacgatcatgcttcagtataatgtttcgactccccgcccttacagtcgcctgcaaacagtatgcggcacactcggctttgcacaaaaatatccggtaccatgcattgccctggattctcatggagatactccgcttgaaggcgaagcacttgaacaagtattaactctctataaacacccttttagcgccaccatcggcgaggaagcacatcgtaaaggattaccgaacgaaatgaactatgtaatggattatcggttaatatattgcctgcgcaacggactgccccttgacatggacgtttatgatgcagccgaatggtcgtgtatcaccgaattaagcgagaagtcggtattgaacggaagtattcctgtagaaataccggatttcaccagaggtgtctgggaaaaacacaaacattagattttacctatttaccccaattaaactataaaaacacatgagaacattcctatcattaaagacatgcttactatctgcacttttactttgtgcaaacagcatttcggcaagcaagattatttccgtatccgatttcggtttgaaacccgacagccgtatcaacgcagtgccatttatacaaaaggcaatcgatgcttgcaagcaatatccaggttccacacttgtctttccaaaaggaagatatgacttctgggcacaacatgctatcgaaaaagattatcacgaaacgaacacctacgatgttaatcccaaaattctcgccgtgctattggagcagatcaatgatctgacgattgacggtaatggttctgagtttattatgcatggccggatgcagccattcactttggatcattgccggaacattaccttaaagaacttctccgtcgattgggaaatcccattaactgcgcaaggtattgtcactcaatctacctccggataccttgagatcgaaatcgactcccaccaatatccttatatcatagaaaacaaacgactgacttttgtcggtgaaggatggaaaagcagtctttgggcgatcatgcagtttgatcccgacacccatctcgtcctgccaaatacaggtgacaacttaggctggcgctcatacgatgcaacagaagtaaaacctggattaatacgcttatccgatcctaaaaaggaggctgataaattcttccctgcgccgggtacggtccttgtgttacgacacagcaccagagaccacgccggtatcttcatttaccacagcatggacacaaaactagaaaacgtaaaactattccatacctgcggactgggaattctgtcacagtatagcaagaatatatctttcaatgatgtacatatcatccctaacacttccaagaaacgtgtgctgagcggacatgacgacggtttccacttcatgggatgcagcggattactcaagattgagaactgcagttgggcaggattgatggatgatcctattaacatccatggaacatgttcccgtattatggaagttctttctcctacccgtatcaaatgcaaattcatgcaggacatgagtgaagggatggaatggggacgtccggacgaaacaatcggatttatagagcataaaaccatgcgtaccgtagctactggtaaaatgaataaatttgaagcactaaataaagctgaatttatcatcgaattatcagcaccacttccagccggagtggaagccggatatgtaatagagaatctgacctgcacacctgatgcagaaatacgcaactgccatttcggaagttgccgggcacgtggtctgcttgtatctactcccggcaaggttattattgagaacaatgtattcgaatccagcggctctgccattctgattgccggagacgcaaatgcatggtacgagtcaggagctgtcagagacgtgctgatacgtaacaatgatttccgttatccttgcaattcttcgatttatcagttctgtgaagccgtgatcagcattgatccggaaattccgacatcggaacagaagtacccctatcatcgcaatatccgcattgtggataataccttccacctatttgattatccgattctcttcgcacggtcggtagacggactcaccttctcctccaatacactcatacgtgatacgacttaccagccttatcactatcgtaaagaaggtattacgctggaagcatgtaaatctgtggttatttcaaacaataagattgaaggggatgtattaggacgtactgttaaaattgaaaatatgaaaccttcggatgtcaagattagcaagaaccctttctttaaactgaaaaaataaaaaacaccatataggcaattaaacgtattcaggctcaagcatgagcatgaatacgtttgagtctttatcccataaatacaacaaataaaggaaggttctctttgatgaacttcaatgctaaggtaatctgccgttctattgctttttcactgactgcacaacgttccgcgatttcccgattagatagatgctcttcgcggctcattctaaagatctgctgccgtctggccggaagttgcgaaatcaatttatcaatatagttcttcaaatcagcagcatccaattcctcttctatatcataagaattttcaagtcctttcagaactgtcattttaaaattcaactcattaaaatgtctacgcgaataattgaatataatattacgggtaatcataaaaagcaacccatcaaaattcttggtaatatcaagaaactctttggactcccaaactttcacaaaaacatcctgaactacttctgaaatcacggaagatgaagtgacataaagtcgtgcaaagttataaaccttcagccaataaaggtcatacagcaaagaaaatgcagccgcatctcccgcttttactttttccagaattattgtctcctccatctcttttcaattgtgttacaaaaataaagaaataaccattaaccacaacattttttttgatttttatttataataaagttaccttttttcctttaataatgtcttcaaaatctattctaattattaaattcaactaagttctgttagaactttgtttcttttcctatctacacatcttgcttttactctttcccatatctgttcttttattttaaaatctatagctttattttctgattcattccattgtattttaagttctctatccactgattccaggtcagcatagcttctccgctgctttttagtcagccgtcctgccagcaaatctttaatcaaactcatctttgtatctttatccatcctatcttactttgttattattctatttattattactcgtatattataaatacacttgagttaagtctacccccacatcccttcgataaaaaaaatagaaaaactatcattaaaatcacaatgagctaatattcaataaattaaccactaaccaaaaagaagtttttttttcaaaaagtcatttttttatcttagttctaacagaactaagatggtattttgccgtagcttcactcgctcttttactaacaataggaggattttggatgaattcagtcagagataatattaacgacgaatttataatggtgatagcacaacaaaaccaaatgcacgttttaccggacagtacaaaagtatggatggaatcaggtagttccattaaatacacaaaagcctttaacaaaaaaagagaagtatggctagaaggcaactcattttttgaagtatataaacatgaaggcagtttcttccaagtacatattaataaagcttttatagaagtaaagggaacctgttttcaaatcaagcaaactaatgctgaaaaaaatgaaatcacgctgtttcatggtaaaatagaatttaatgtagaatctacaggagagaaaattatcatgtctccatcgcaaaaggtaatgtataatccaaacaatgcacaaacattagttgagaatgtaatggatatcaattggaaggacggaagatacaacttcaaagaaaccccattaccccagctcatttcaattgtaaatcaaatataccaatcaaatataattctagaaggaaagtttactaaacaatcttcattcacaggtagcatccgttatgatgaaacattggatgacgtaatagagaagctttgtttcagccttaacctcacatacaaaaaacagaatagtaaaatagtaatatataattaaccatatttctaataattaacccaatatttaacctcacaacaagttaaatcatgaaaaaaaatcacagttgttaccggaggcgatatctgaagcatatcgcactcgttttgctcttttaccccttgtccgctcttggagctcagggacacatatctatcaaggggcaatcaatcactattatgcaagctatccagcttatagaaaaaaacagcgactacacgtttttctacaacgcagcagatctcgaagacaaacaacggaaagacattaattgtaatggtcctattgacgagattctggatgaagttttcaaagacagcggtattagctatatcgtaaaaaacaaagaggttattctcaacgtacaaaaaacgaataacacccaacaaaagaaaaaacgtactgtaaccggtactatcatagacgcagtggacgatagccccatcattggagctaacatcacgattaaaggtgacaagaacactggtacaatctcggatattgatggtaattttagtctttccatacccgacaataagacgatccttgtcgtaacttacatcggatataaaactcgtgaagttcctgtagaagatctagggaatatcaaaattgtactggaaggagacgatcataccttgaatgaagttgtcgtagtcggttccggtacccaaaagaaggtcagcgtaacaggagctatcacaagtataaaaggtgccagcctcaaactgccgtcatctaccctgtccaactcatttgccggaaagttggcgggtgtcatcgcaaaaacaaactccggagagcctggctccggtgccgaattttacattcgcggtatcggtacttttggtggacgagcaactcctctgattttattggatgatgtagaaatatcatccggtgaccttaattatgtgccagccgagaatattgaaagcttctctatccttaaagatgcatctgccaccgctatctatggttcacgcggagctaacggtgtaatgatcgtcacaactaaaggcggagaatacaatagtaaaacatccatcaaagttacagcggaaaactctttcaactacttagacaagttcccggaatttgtggacggagctacttacatggatatgtataataaagcttcattagccagaaactcttccgctacacccaaatacagtgctacagacatggaacgcacggcatccggagtcaacccatacctataccccgatgtaaactggcaagacgtattgttcaaaaacatgagtatgcgccaacgtgccaacgtcaacatttccggtggtggtactaaagttaaatattacatgagtttggatgtcagccatgattcaggcttgctgaacacagggaaagcatattcatggaacaacaatattaatataatgaactataccttccagaataatattgcttataaactgacgccgacgacaacaatcaaaatgaatatgaacgctcagatccgtcagaaaaaaagcccgaatgtatcaagcgaggatttgttcaaacagattctgactactacccccatagaatttccggttacttatccaagtcaggacgggcgtatcatgtacggcaataacatcatctcaggaagtaccttatacacgaacccctatgccaggatgatgacatcctttgccgaaacgaacgaaaatacacttaacacagttatcaagatagaccaggatttggattttatcactaaagggcttaaaattaatgcttttgtaaatttcaaaacctggtcaagttctcactttgatcgtagcattgctccttattattatcgcataaaaagcggaagctacgatgaaaccgacctggaaaatacgaattatgaattggaactgctaaattcgaatggcagcgattatatcagtcagtcggctatcggaaagtcttccgaccaaacatttgaattacagttcaacctaaactatgcccgtcaattcggtctgcataatgtaggtgccatgttactctacaaacaacgcgaatacagaagcgacgtgttacccaaccgtaatcaaggcctttccggacgtcttacttatgattacggacaacgctatctatttgagtttaacttcggttacaacgggaccgaacgtctggccaaagaagaccgtttcggattcttccctgccgtctctttaggatgggtaataagcaatgaagctttcttcgaaccaatgaaaaatgtagtggacaatctcaaggtcagaggttcctacggtcttgtaggtagcgacgacctggcaacagccggcggaagttattacctgtatatagacaagattacaaacaacgacctgtcttatttgaaatggacttccggacaaaatatggactaccaattaggaggtcctcagatggcatactacgccatgtccggtttgggatgggaaaaagtaaagaagctcgatataggtattgattttacattgttccgcaactggacatttaccttcgattatttctacgacaagcgttatgacatcttcatgaaccgtgaagcatggccgcaatcactggcttatcatattgccaaaccttggagtaatattggtaaaatggataataagggagtagaattcagtattaattatgccaataacttctccagagatttgtctgtcagtctacaggcaaacttcacctacaacaaaaataaaatggtctatgtggatgaaccggaatatccgacaatatggaagtcagaaaccggaaaaccttattcacgtattaccggctacatagcagaaggcttattcaagtcacaagaagaaatagataacagccctgcccagaatttgggttctacacccaaggtcggagatattaaatatcgtgaccttaacggtgatggtatcattgattcggatgaccagacgatgatctccaaatatggaagtactccacgcttacaatacggatttggcggaactgtcaactacaaaaagtttgattttggtgtcttcttcagtggctctgctctgcgttctatcatgacaaacggtattgaccctttccaagaaggaatagccgtcggtaacagaaatgtattaaaatatatagccgataattactggtcggaagaaaaacagaattgggatgccaaatatcctcgtttgggactacttgcaacagacgttgccaacaatacagtgaacagtagttactggttgagaaatggttctttcctccgattgaagaatgtagaagtaggatataagataccttacggacgtattttcgtcagcgcagccaatctattcacctttagtccgtttgacctttgggatcctgaactgtcttcttggaacagttatcctatgcaaaaaactgtcaatgtcggaattcaacttcagttctaatttattatgagaaaaaatatgaaactaacacgcatctttcaaaatataagtatagcagttattatcactgcattgggcttaacctcatgtgattatctagacgtcgttccacccgaacaacccaatatcgatgacgcaatgtcaagccccacccgagctttaggatttctttattcctgttatagaggtgtcagtacagacttacccagtgcctatctgggggaaataaactctacgacagacgaatatgtattaccttattcatggaacacagacggttattggggcgcctatgcatttaacactgcatcatccactaaccaagactggctatggggaactacttaccaatatataggacaatgttatctgtttttacaaaagttggaaaatgcgggaagcgacattgcatctgatgcagaaaaggaacaatggagagccgaatgccaattcctggtagcttattaccacttcgctactttaagaagatatggtcccatcccaattacagactcgtacattccgatggataccccaacgtcagagtataatggacgttttcactttgactattgtgtagactggattgcgaaccagctggatgaagccgccaaagtacttcctgccaaccgcaccgttaccaatgaatggggtcgcgctacatctactatagctaaagctgtaaaagcacgtttgttactttatgccgcatctcctttatggaacggaagtttcccctaccctaactggcagaatgagaatttcgagactccgggttacggtaaagctttggtaagcaatacttatgacaagagcaaatgggaaagagcactggccgcatgtcaggaagcacttacattagctacaacttccggtgaccgtgaactttacgatgacgacgaatattactcccgacaatccctgaacttaccttttgttcccggagtagcagacgtggaagataataaagaattcctgaaaaacgtaatgaagatgcgctatgccgtaagtacacgtgaatctgaaggaaacaaagaaattatctggggattatccgaccagtttgatttttattcccgttatccgcttcgtattctgaagaaatcggatggaacatggcatgctggttatagtggtgtatctcctacattatatacgttcgaacatttctatacagctaacgggaaactacctgaaaaagaccttgactttactccttcctctgaatggtttgagtcagcaggtatctcttcacgggaagacattatcaaattgaatgtgggtcgtgaacctcgtttctatgcatggatggcttttgacggtggtgactacggaactaaatttgcggccggttctcctctgaaactggaaatgaggaattcggaaatgcacggttacaatccgtctctatttaatcgtgaccatagtgtcacagggttcctgacacaaaagtttgttgatccggtaactgaattctatacagccggcggttctacaagcggaacaagcgcacctactatcttattccgcctggccgaactctacctaaacgtagcagaatgccatgcagcattaggaaatacacaggaagccattgatgcactaaatcctgttcgtgaacgtgccggaatccctaaattaacattggctgatatcacaaataatatgacaataaaagactgggtacacaatgaacgttttgttgaattatggaacgaaggtcaccgcttcttcgatgtccgccgttgggcagaaggagccaagtactttggagcaaacaaacgggaaggattgaatgcagaagttcaaagtcccacattcgaagaatttaataaacgaactacagttgatgcaccttatgtgtgggaaaaccgcatgtacctgaatccggtattctacaacgaagtatacaaaaatccgcaaatggtacaagcacccggatattaattattttttattcattcataacaatatagaatatatatgaaacatatatcaatagcattgtgtttgtgcgggatgattctgatgaatacttcctgcgacaattatgacgatacctatccgcaggaatatgagaaaatactatcactgcagaccaccggtgagcaagccgtagatctttataaaacaggagaggctactaactattcaataacggtcattaaatccggaagtcaacccacattgacagcttctgcccatatcggtgcaatggatacagtcaattttgagaagtatatctccgagagaggtttggactatgtggcaatgcctgccaattgttattcgttcaacatggaagaactcgattattcttctgctgaaacctataagatcatcaatttacagttgaataccaacgagatagaaatctttgagcagactcttgaagagggacaaacgtgtgttcttccaatcatgctgaccagtacatccgattccatcctggcggataaaaacacattagttctgaaaccggagattattactccatctctttcagtcactgaatccagttcaggaaccgtgactaaatatttatcacaaagtggaggtatcattgatcttgctttaggattgcaagtcgaaaaccaatggaatttcacctgtaaagtagcaattgatgaaactactactaccttagaaggagcaacgttagtttcggatatcatctcatttgagcctggaaacacatcttctgttcaggttaatatccctaagtttacgaagacctccggaaatgtgggtataaagattctggaaattaatggaaaagacggtttcgaattcgacacgaatccatttatactggttgcatctgttgaaaaatacagtctgacagcggacatgctttccagtaatgcaatagaaccgtcagaaggttccttagctaatttattggatggagacataggtacctacttccacagcgcgtggagtgtatcaattgccgacaagcattatgttcaagtaaaattgcccgtatcaactaagacattccgtttcacctatacaaacagatcaaataacggaaatgccgctttggcatggttcaatttatatacaggaacgaatgagaacaatttacaactttacaagcgttttgcgtgggatgaagatggtctcccgtcaggtgctgcaggagtttatgtttctcccgacgtttcaatagacaatgctgccaacaccttacgctttgaatgtgaaagcaactggaccagtggttccttctttgtatggagcgaatttagtctgttcatactgtccgaataataaatgagagacaaagggtgagtcagacttttgattcacccttttatacctcatctatcttaaaaactaatacagcaaaaaaatgacaataaaaagattcattactaacctgttagccctttttactctattcacagtttcactggcatgcaaggataccgaaaaatcgattataaatagctccttcagtatcagtgaagaatatctgatacaaaatctggataaatcaagtacgtctgtccagattccaattaacacatctatggagttagctcaatggagtgtctcttatgaagcaaactggctacaatgctcaaaacaaaagacagcagcagaaggaactttcctgagaattacagtgaatgaaaatacaggcgaaaccaaaagaacagccaacataaaagtaacatcaactactgctacctatactatcaccgttaatcaatatgccaaaggcgaagtaattgttgagggtgacatcaaggttacaccaaccggaggcaaagcgagtgagcatcaggagggacaggatattgaaaatacatatgatggcaaattttcaactgatggagctgcccctttccacactccgtggggacaatccgccaaattccctgtcacgctggaatactattttaaaggagatacggaaatagactacttaatttattatacacgatccggtaatggaaacttcggaaaggtcaaaatatatacaacaaccaatcctgaccgatcagattatacattacagggagaatatgactttaaagagcagaatgctccttccaaagtttcattttcagaaggcataaaagcgaccggaatcaaattcgaagtattaagcggtctgggtgattttgtaagctgtgatgaaatggaattttacaaaacaaatacggataaaacactggataaacaacttcttaccgtattcaccgatataacttgtacggaaataaagaacaacgtcaccaacgaacagatacaagctctgccagactatttcgtcagaatagcagaagcggttcgtgacaatacatacgacaaatgggaaaaagaatttcgcattcgcagctatgaaccatacagtaatattgctgaatgggcggataaattaatgactaagaaatatagtgatctcgacaatccgactggtatatccgtcaaggcaggagacgatatcatcgtattggttggtgacacatacggacagaatatttcaatgcagtgtatttgggaaacaggaacagaatacaagcaaacagcttcttcaggcgatgtctatatgctaaatcccggagtcaacaaactgactatgaaaggagaaggacaattgtttgtcatgtacaacaccgaactgacttcaaatacagcaaaacccatcaaaattcacataccactcggaagtggcacagtgaacggtttcttcgacctgaaagaacataagacagacgaaaaatacgctgaattattgaaaaaatcaacacacaaatacttctgcatacgcggtgaaaagatcatgttctatttccaccgcaacaaattattggaatatgtacccaacaacatcctctcagctatccatctatgggataacattgtcggctggcaacaagaattaatgggaattgacgatgtacgcccatcacaagtcaacaaccatttatttgccatctcaccggaaggaagttatatgtgggcttctgactatcaaatcggatttgtctatacctacttaggcaatatcttgttggaagataatgtaatggcagcggaagataacgcgtggggaccagctcatgaaattggccatgttcatcaggcagctattaactgggccagttctaccgaatcatctaataatctgttctctaatttcattatctataaattaggaaaatacaaatcgcgtggtaacgggttaggaagcgttgcaaccgcccgttatgccaacgggcaggcttggtataatatgggagacgcaacccaccagaacgaagacacagaaacgcatatgagaatgaactggcaactatggatttactatcaccgatgcgaatataaaacagatttctggcaaacacttttcaaactgatgcgtgaagtgaatatgaccgaaggtgaagatcccgggaaaaagcaacttgaatttgccaaaatggcaagtaaagccgccaatcagaacctgacagactttttcgagatgtggggattcttcgaacctgtcaatacgactatcgaacagtatggaacatacaaatactatgtaagtgatgcgatgattcgggaagcaaaagaatacatggcacaattccctgccccgaaacatgctttccaatacattgaagacagaaagaaaagtgagtttccaccgaatgactaccgctattcggcagtcggagatgtcggatattacactcaattcaaagaaaatcagaagataaccaaagctatcacggcagagctggcaggacgcaaggtctccatccaaaacggagatgaagctgtggcttttgaactcagagagaatgatgaaaatggaaaattactttatttttctaccttcacgactttcgagattccttcatctatattgatggtgaatgccaaattatatgccgtacaagctgacggaaaacgtattctgttataagaataatttaacttaacacacattacagatgtagaaacggcatcgctcactgttcgggcgatgccgaaaatatcattataacatagcgaatagtgcgactctttttctaccaaaaatatagacgggcaatgaaaatatctacaataattacactggattgattaattaattagtatttttgacaccgaaatgaaaaaccaattaataacccccaattaaaaattaaaagaaagatgaagaaactactacttaacacactcatcggtcttgcattgttgacctgccagaccagttttgctcaaaagacaaaagcaaagttctctccgattaaagtagaaactccggctcgtccggcaaatcagcaagatgtaatccaactcgttactcctaaacttgaaacagtccgtgtaggctttatcggattgggaatgcgcggtcccggtgcggtcgaacgctggacacatattccgggaactcagattgtagctttatgcgatcttctccccgaacgtgttgaaaatgctcaaaagatactggagaaagctggtctgccgaaagcagcttcctacgcaggagacgaaaaagcatggaaaaagctctgcgaacgtgacgatatcgacgtggtatacatagctacagactggaaacaccatgcagacatgggtgtatacgctatggaacatggcaaacatgtagccatcgaagtacctgccgctatgacactggatgaaatctggaagctaatcaacacttctgaaaagactcgcaaacactgtatgcaactggaaaactgcgtatatgacttctttgaactgacttcactcaatatggcacaacaaggtgtattcggtgaggtacttcacgtagaaggtgcttatatacacaatctggaagacttctggccgtattactggaacaactggcgtatggactacaatcagaaacatcgtggtgatgtatatgcaactcatggtatgggcccggcttgccaggtactcaatattcaccgtggcgaccgtatgaaaactctcgtagctatggacaccaaagctgtgaacggtccggcatacattaaaaagtctaccggaaaagaagtaaaagacttccagaacggagaccagaccacaaccctcatccgtacggagaacggcaaaacaatgctgatacagcacaatgtaatgactccccgtccttacagccgtatgtaccaggtagttggagctgatggctatgccagcaaatatccgattgaggaatactgtctaagacctacacaagtagactctaatgatgtgccgaatcacgaaaagctgaacgcacacggttctgtatctgaagatgtaaaaaaagcattgatggctaaatacaaagatcctattcacaaagaactggaagaaactgccaagaaagtaggtggacacggcggtatggattatatcatggactatcgtctggtatactgtctgcgcaatggtttgccactggacatggacgtttacgacctcgcagaatggtgttgtatggccgaactgaccagactctccatcgaaaacggttctgctccggtagaagttcctgatttcacccgtggcggatggaacaaagtgcaaggttacagacatgcttttgccgaataagccattataccttattaatatataaacttacggatagccagactgggaaaaagtcaggttatccgtaagttcatgttcggcactttactgattattataatcacctatatgaaagcagatattttaaaaccctctagacagactatccttcgggaagccaaagattatgtgatgatcgccgtaggtatgatactttatggcatcggatggaccgttttcctactccccaacgacattacgacgggcggagtgccgggtattgcatctattgtatattgggcaacgggattcccggtacagtatacatatttcagcattaactttttcttattgttgcttgcgcttaagttattgggattaaagttctgtattaaaactatttttggagtattcaccctgactttcttcctgtccgttatccagcaactggcatcaggcgtttcccttcttcgcgaccaacctttcatggcatgcgtcatcggagcatcgttctgtggcggcggtatcggagttgcgttctgcgccaacggaagcaccggcggtacggacgtcattgccgccatcatcaacaaataccgggacataaccttgggaagagtcatactgatctgcgatatgatcatcattacctccagttatttcgttctgaaggactgggagaaggtggtatacggatttgcaacactttacatttgcagtttcgtcctcgatcaggtagtaaacagcgcacgtcagtctgtccagttttttatcatatccaataaatatgaggagataggacgacacatcaacgaataccctcaccgtggagtgacgatcatcaatgcaaccggcttctacacaggcagagaagtgaaaatgatgtttgtgcttgccaaaaagcgggagtctaccatcatcttccgactgattaaagatatcgaccccaacgcatttgtatcgcaaagtgccgttatcggagtttatggggaaggcttcgaccatatcaaagttaaataaaaaaagaaacaagattgaaaaacatgaaatacagatcatatcacctattactggcaggaatattctctctgttaacaacaggcgctatggccgaaaagacatccgacaaaccttactggcaggatgtgcaagttgtatcggtcaataaagaatatccgcgtacttccttcatgacgtacgataaccggactgatgcacttaccgggaagtttgaaaaaagcaactattatcagttgctgaacggtacatggaagttcttctttgcagacagctacaaagaccttcccgccaatatcaccgacccttccgtgagcacggactcctggaatgatatcaaagtcccgggcaactgggaagtacaagggtatggagtggctatctacaccaaccacggttatgagttcaagccccgtaatccacagcctcccagccttccggaagccaatcccgtgggagtctaccgtcgggacatcgatattcccgccgattggaaagaacgggatatctacctccacctcgccggagcgaaatcaggtgtatatgtatacatcaacggacaagaagtaggatacagcgaagattccaagaaccccgcagaattcctgatcaacaaatacgtgaaaccgggtaagaatgtacttacactgaaaatcttccgttggagcacaggttcttatctggaatgtcaggacttctggcgtatcagcggtatcgaacgggatgtttatctgtattcacagcccaaagccgccctgaaagatttccgcatcacatcgacactggatgacagttacaagaacggagtattcgctttgaacgtcgacctgcgcaatcatcgtccggctgcaaccaatctgacactggcatatgaactgctcgacgctcagggaaaagtagttgccaccgaagagaagacaacttatgtccctgtcaacgagacacgaaccctttcttttgacaagaatctgaccgatgtacacacatggacatcggaacacccgaacctttacaagctagtaatgactgtcaaagaagagggtaaagtcaatgagattatccctttcaacgtaggattccgtcgcatcgagatcaaacctatcgatcagaaagccgccaacggaaaaccttatgtatgcctgtttatcaacggacaaccgctgaaattgaaaggagtcaatatccacgaacataatccggaaaccggacattacgtcaccgaagaactgatgcgtcgggacttcgaactaatgaaacagcataatctgaacagtgtacgtctctgccattatccgcaggaccgccgtttctatgaactttgcgacgaatacggactttacgtgtacgatgaagccaatatcgaaagccacggtatgtactacgatctacgtaaaggcggctcattaggcaacaatcccgaatggctgaaaccacacatggatcgcacaatcaatatgttcgaacgcaacaagaactaccccagcgtcactttctggtcgttaggaaatgaagccggaaacggatacaacttctaccagacttatctttggttgaaagaagccgacaagaacatcatgcaacgtcccgtcaactatgaacgtgcacaatgggaatggaacaccgatatgtacgtacctcagtatccgggtgccggctggctggaagatatcggcaagaacggcagcgaccgtcctattgtcccgtcagaatatgcacacgcaatgggcaactctaccggaaatctctggggacaatggcaggctatctataaatatccgaaccttcagggaggatatatctgggactgggtagatcagggtctgctccagaaagacaagaacggaagagaatactgggcttatggaggtgacttcggagtaaatgcacccagcgacggtaatttcctctgcaacggtcttgttaaccccgaccgtggtccgcatccggcaatggcagaagtgaaatacgtgcatcagaatgtcggcttcgatgcgattgacgcagcatcgggcaagttcaacatcacgaaccgtttctacttcaccaatctgaaaaagtatcagatacattacagcgtactggccaacggaaaaaccgtcaaaagcggaaaggtatcactggacatcgctccgcaagcttcgaaagaattcaccgtaccggtaaatggtctgaaagcccgtccgggaacggaatatttcgttaacttcagtgtgatagccgtagaaccggaaccgctgattcccgccggatacgaaattgcatatgaccagttccgtctgcccgttgaagccgaaaggaatacgtacaaagccaacggccccgcattacaaactcaaacccaaggagacgaactgactgtttcttcttcaaaagtaaactttgtattcaacaagaagagcggtctggttacctcatacaaagtggatggaaccgaatacttcaaagacggattcggcatccagcccaacttctggcgggcacctaatgacaatgattacggaaacggtgctcccaaacgcctccacgtatggaaacagtccagcaaagacttccacgtgacagacacgaaggtaagcacagaagacaaagccgtcctgttgcaggcaacttatctgctggcagccggcaatctgtatgttgtcacctataagatatacccaagcggaatcgttcatgtaaatgccaaatttacttctaccgatatgcaggctgccgaaacagaagtctccgaagctacccgcatggctaccttcactcccggaagtgatgcagcccgcaaagccgcttccaagctggaagttccccgcatcggtgtacgtttccgcttaccggcacagatgaataatgtacagtatttcggacgtggtccggaagaaaactacatcgaccgcaatcacggaaccatggtaggcatctatcagacaaccgccgataagatgtacttcaactatgtacgtcctcaggagaacggacaccacacggatacgcgctggcttaacctgtctcccgataaaggaaacggccttgtcatcgttgccgacagcctgatcggtttcaacgcactgcgcaattccgtcgaggacttcgactcggaagaagcgctaccccacccctaccaatggaataacttcagcccggaagaagctaccaaccacgacgagaaggccgcccgcaatgtattgcgccggatgcatcacgtcaacgacatcactccaagagacttcgtcgaagtttgtgtcgacatgaagcaacagggagtaggcggttatgacagttggggggcacgtcccgaacctttccaccagattcccgccaaccgcgaatacaactggggggtcactctggtaccggtccgttccggcagtcaggctaccgaagccaccaaatatgattatcgataaccttagtataaattttaaagaaaagacccatgaaagatttatcaagtattgtagccaagttcaacacccaaggtactatcacagagatcaagcctttgggagcaggacttatcaacgacacatacaaagttaacacacaggaagcagacgcccccgactacgttctgcaacgcatcaaccatgccatcttccagaatgtagaaatgcttcaatccaatattgccgcagtcaccggacatattcgcaagaaactgaccgaagccggagaagccgacatcgaccgcaaagttctctctttcctcgccactgaagaaggaaaaacttattggtttgatggagaaagctactggcgtgtcatggtattcattccgcgtgccaaaacgtacgagactgtcaatccggaatattccaattatgcaggagaggctttcggaaactttcaggctatgcttgccgacattccggaaacactgggagaaaccatccccgacttccataacatggaattccgtctcaaacagctacgtgatgcagtcgctgccaatgctgccggacgagtagccgacgtacagtattatctggacgagatagaaaaacgtgcggacgaaatgtgcaaggcagaacgcctgttccgcgaaggaaagcttccgaaacgagtatgccattgcgatacgaaagtaaacaacatgatgtttgatgaagacgggaaagtgctttgcgtcatcgacctggatacggtaatgccgagtttcatcttctccgactacggtgatttcctccgtacaggtgccaacaccggagatgaagatgacaaagacctgaatcgtgtgaacttcaacatggagatattcaaggcattcaccaaaggatatctgaaaggtgccaaatcgttcctcactcccattgaaatagagaatctgccttatgctgccgctttattcccctatatgcagtgcgtacggttccttgccgattatatcaacggagatacttactacaaaatcaaatatcccgaacataatctggtgcgcaccaaggcacagttcaaactacttcaaagcgtagaagaacatacaccggagatggtggcattcatcaatgagtgcttggttaatggataatggagaatggaaaatggataattagtggaaatggggcggagctgtttatttggtaaacgctccattcttccactgataaacaataggacggcggagaaacggtttaagtttttctgccgtttcttttgacatatagtcgggagtggacagagtgacagccaattctgtattttccttgttcatatccactttcatcaataagatgtctgccgaacgggaggcttcatcaaattcatatatagaagcggaatcaggagttatcagaaaatcactcatgaccgggagggtaatgaacgaatggtcagtcagaggtttccagtctgtagtatagaagcggatgctactgtcacaagccggagcacatgccgtagctaccgtacaaatcacattcgtggtatcattcaaagccaatactttcatctgccaagtggtttccggagtcatctgcatccggacatagtccttactcagatcggtcatttccgatttctgtccgaagcggttttccacttgtgctttcatcttactgctcagaaagtcgatgcagtcttcacggttcaccttcgtaagcaagggacaaagtgaatccggcacgttgataaaaagagtctttgcttcctgcgcctgtgaagagacaaaagtaaacagaccgatgatgaaaaatgcaatggtatgagtgattttatttgatttcatattgtactttttatttagaccccaaatataagaatatcattccgattaacacgaggataaggtcaatcgctttgctttttaaattcttttcacggaagaagagcgctccgaaaatgaaagatacgatcacgcttccccgacgaaccatcgaaacgatggagatcatggagtcatcatagctcagtgcataaaagtaaacaaagtctgccgccgaaaggaatacggaaatcagaatgatggtccagtcccagcggaaaggagtggtcgtcttccgtttgggccaccagaggagaaagataatggttcccatgataaagaactggtagacattataccacgattgcaccagcatcggattcaactgtttcatcagaaacttgtcatacaatccgctaacagctcccatgactgctgccagtataataaagagaatccatttgttatgcttgaaatcgatcccttctttcttccccgaacggctcaacataaagaaggaagccactgccagcatcactccgatccattggtagagattcagacgctcgccaaacaccagcattgctcctacaagcaccatcaccggacgggtagcattgataggccccacaatggtaataggcaagtgtttcatcccgaagtaaccgaatatccacgatgacagaacgataaacgatttgatgataatatatttatgctgctcccatcctgcaacgggaacattaaagatggttcccccaaggagatcaggctcgaatgccgataccaaaatgaacggcagaaaaattagactggagaaaagcgtattcaaaaacaatacaggcaacaccgcattatctttcaatgactgtttcttgaatacatcataaaatcccagcaaggtagccgagagaaaagctaataataaccacatgttgaaataagtaataggtaataagtaacaagtaatattgagctgactgggaagtcggcagtatctaacactcccctccttcgggaaggagtgtagatagtactgactttttagtttcctctgagaaaatatcttccggatattctacgttgacaaggaagagcgcatttcccggagcggaagttcctgctttgcaacgatcctgttgttctatcactttacggaacccttccacggtcagtttgccacgtcctacctcgagcaatgttcctacgatggcacgtaccatattacggagaaagcggtcggcacggatagtaaatacccaggtggtgtcttcgccttccatcttcgtccattcggcatgggagatgtggcagatgtttgtttttacatctgtatgcagtttgctgaaacttgtaaaatcaatgtattcgaacagggttcgtgcagcctcgttcatccgttcataatccaatgaaccatagacacggtagcggtactggcggttgaaaggatatttggcggtagtcacataatacttatatgtccgggcagtcgcgtcaaaacgggcgtgcgcatccggttttacctgacggacacgatagacagaaatatctggaggcaacagacggttcaacttgtcggcgacagtcaccgtatcgagcacgtcttcatgatcaaaatgtgccaccatcagcgaggcatgcacccccgcatccgtccgtccggcacctatcacttccacatcacgacgcagaaaagtagacaaagccttcatcaagcattcctgcacactactcccgttgggttgtatctgccaaccgtgatagttggttccatcataagccaaataaataaaatacctttgcacgccgattcctcattttagggttttcgactgcaaaagtagtcatttttttattcatacgtagaaggagtcgtaccaaatgcatccacaaaatgtttgcggaaagtcggaatgtcattataccccaccatttcggcaacttcctgcactgcatattgtttcgttttcagcagtactcccgcacggcgcatacgtactcctctgatcagttctataatggtatagtctgtactttgcttcactttgcgatagagggtgggctgactcatattcatttccgctgccagtttcttcacgctgaagtccgcctcgcaaatattttcttccacaattttgataacggctgtgataaacggatcttccgtcttcacttcttcacccgcctgttccggttcgcttacgacaatcgtatccgttcccggcaatttgaacaacttcgtgtacatctgcttcaacgtctgacgaccattaatcagactgctgactttcgccttcagaatacctggagtaaacggcttcagtacataatcatccgcacccagctgcagtccgtgaataatatcgtcgtcttccacctttgccgtcagcatgataaaaggaatactgcacgtttccggattctccttcacctcccggcaacattcgaaaccgtctttcaccggcatcatgacatcacagatgatcaagtccggcatctctttcattgccgtatcgactccctcctgcccgttggttgccatcaacaagttatattcattgccgaagagcactttcagatacaggcggatatccttatgatcttctacaatcaatatcgtctttttaactccgcccgctacgggggatgctacttcttcggcaggcaatgcctccgcaaaaagcggcagttgctgatcctgttgcaccacagcatcctctactgccaaatcctgtttctgtgtttctgccgattcgggttccagctctgctacttctgtcagttcttccggatcaataaactgaatattcggattgttttcaaagacatctctgtcggcgggaagattgaccgtgaccttcgtcccctttccttcagtactttcaagagtaatcgttccgtaatgagcttcgatcatctgttgcatgatggtgaatcccatttgcgcagccgacatatcacgttccgatccttcattctcgctcatcaactgctcaacagttcttaccctttcttttccgtcatcttctactatcaggcagacatagtgcatattgtcattcacgacctcacaaacagataaagaaaccgttcccgcataatgcgtatgggtgaaagcatttgtcaacagattatgaatgacgaattctattttctttttgtccacataaaattccatctccttcttgattctcttctcgcaatggaaatcaatggtatacaccttcaacaagtcccggacaccaaaaagagagctgtcgatcattttatccaccgaatacggagcaacttccagttttgattccatattgccctgcccgtatactgccagcaactggtcgcaggcatccaccatgcggagtgagttccggtacgccacctgcagagaaagctgagaagtctgagagtcatccttctgcaattccttcagcggagcgatgatgagtgacaacggtgtacgcaactcctgtacaaagagcatcagcaaccggttcctcatcgcttctatctctttcttttgttcctgtttcagcttttcgagattcaaattctccttcagtatcatctcacggtcacgatgaatctgtttacgctgatccttctttctgaaataagaatagaagaaataagataatccgccaagtaacagaacatacatgatatacgcccatatagtctgataccatttgcccttcaccaccagaggaatctcgattacctccccttctttcccatccgggaaaaccagcttagcctgcaaggcatattttccggcagccaatccgttgaaccacagtccttctgcaagcggtatcattttccattctttgtccgcaggaagcagacggtaagcaatcttgcgctgtgccagtccgtaacgcagatcggaaaagaacaaatgaaagtcgttgttatcggaagcaaacaccagtttctcctgtttttccggagaaacagccagaatcatctgcccgttccgcttttctcctgccagcaccgtttctccaccgacttccacatcggtcagcatcaaatgcttcttgccactatcgcctttggtagcagaaggatcaaagaaaatcagcccccaggaattcgcccataacaagcgtccgtcattcaaacgacagactgcactgcagtttcccaccgacagataactataaaaagcctcctgtccatttctgatggtcatcactcctacattgtttcctgcccatgtgtttccgatatggtcgtcgaccatgcaactgacatgtccgtccgtcaatccactctgcagtgtataaacagattctatcttatccttctctcttccgtcgatgcgaataacgacgttcagataggctgcataaatctgattatagttattcacatacagggtccgcactccggcttcttccagcccattctccttttcatagtttccttccacccgtatctggtcaccgttcgtttcaattcttttcagccctttatccgtacctacccatacatttccttccttatcttcagtgatggcaaatacattcttgatttcaccgggcagctttatatttttgcatccgtgagttttaggatctacctgtaccagtccattcgaagtacctacccacaaacgattccacgaatccagacagaaacaatggacaacagcctgcatcctcccgccttcgctgtttttcaactgaaaagattccacgtcttccgtaagcggattgacagagatgatctctcccaaattgttacccagccaaatgtttccatctttacctttatatatgtgataacgtccggagagaccggatacttttttccatggttcaaaatgtgtatccatcgaaaatgacgaagtagtgcttctcatgatgcctccatcggtcaccgtcaaccagatatacccttttgcatcttcgaccatgccatccactctggatttgaaattctgccgtacccggctgtacatactgtcgctgatatcaaactttaccactccgccgccaaaggtacctacccaaagaatctgctgcctgttatcccatagcagactggtcatcttattttcgatccttgaatggaacgctctttccccctgtgtcagcagtgtcaatgtaaacggactctcacacaaattcagattctcaaaatgcaatttatataatccgtcccatgtcgtcagataaaacgtctgcttatctttcatcaccatatccgtaacatacgagttggagaaatccggctggtcgcccccctcgagagagactacacgttccttatgcgatttaaggtcataacatacaatatcattccataatctgcatatccataaatatccctgtcgcaaaaagagtctgttcaccacatcatattctctgatcacagaagttcttttggttacgagatcataatgtatcaccttttcgcggtcaacggcaaagtacaggtttgtttttccatccgtgcaaagattagtaatctttccttttatcaaaggttcgggattcaatatacaatagacgaaatcttcttttccttctttcttgcggatgggacgcgattcgaacaatccatgcgaagtagccagatacaggctgccatcattccagcaaaaatcctgaatctctttaagtttcagcggcctgtcaaaacgtacaggcaaaaacttttccatttctttgtcaaaacaggttattcccccctgatagagtgaagcataaaataaaccgtcagaaccttccttcagcgtttttacagcctgatgcaaaggagtggaaagggagtcaacgctcataatgagcggataatcacgaaatctgaagccatcgtagcgggagattcccttgtcggtagagaaccacataaagccttcgcttccgtaacaaacatgataaatagtattatttccgactccgtttttaaccttaattccgcaacactattataaattaaactttttaagtacctgagcaacaaaaagttgctcaggattttgccatgtcagaattttcacttatcttagtgttgcaaaaaaaacaagagaatccgacgatagacatggcgaagatacaaattaaatctgagagactcactccttttgggggattattttcaatcatggagcaatttgactccacattatcatctgtaatcgactcaaccctcggtctaaggtgtagatcgttcggttatcagtacagcgaaatcatccgttctctcatgagtatctacttctgtagcggttcatgtattgaggatgtcactactcatttgatgaaccacctctcgcttcatccgacacttcgcacttgtagctctgatactatcctcagggcgataaaggagttgacgcaagaaaacatttcatacacatcagatatgggcaagacctacgatttcaatacggctgacactctcaatactttattgctcaattgtatatttgcatctggccaactgaaagagggtgagatgtatgatgttgatttcgaccatcagttcatagagacagagaagtatgatgcaaagcctacatacaagaagttccttggttatcgccctggcgtggcggttattggcgatttgatagtcggtatagagaatagcgatggtaacacaaatgttcgtttccatcagaaggacacgctgaagaggttctttgcgagatttgaacagaatgggctcactatcaatcgcttcagagctgattgtggatcatgttccgaggaaatcgtggaggaaatagaaaaacactgcaagtccttctatatccgtgctaaccgctgcagttcgatctacaatgacacctttgctctcaaaggctggaaaactgaggaaatcaatggcattgagtttgaattgaactctatccttgttgagaagtggaaaggtaaggcatatcgacttgtgattcaaagacagaaacggatggatggtgtgcaggatttttgggaaggagaatacacataccgttgtatcctgactaacgactatgattcttccgtaagagaaattgtcgagttctataaccttcgtggaggaaaggaacgtatcttcgatgatatgaacaatggtttcgggtgggacagattgcccaaatccttcatggcagagaacacagtgttccttcttcttacagcacttatccgtaacttttacaaggccattattcaaagacttgacgtaaagaagttcgggctcaatgcaacaagtcgcataaaagcgtttgtcttcaggtttatctctgtaccagccaagtggatcaggacatcaaggcggtatgtgctgaacatctatacctgtaataatgcttacgcagatgttttccagactgattttggataatgcctacaacttatgggaatgatattgtgtattgcctcaagtcacattgtggggtaaggggatattgtaggcagaagtgggtgcttcaagttcaaattatctgcaaattcagtaatgagaggacgtgtaaacgcaataaggacgttcaagggcttagttgcggatttgaggtttaattatttgcggttccaggtcccagtgggtatctatagagtatgacggaagaaaaaccgtcaacagcaacaacagaaagaagaacttcctcatatcttaattgtattttgttcatgtgtattggctgataaagatatataattaaatcattagcaaatcggataacaaatattttttagcaataattcacaataaagtaaaagcccgctgattcgtaaaagaatcggcgggcctcccattgtttgtttcttaattgcctgaatgaccaaagctatattgtttgctgtctggttcctctttttgtctgatggaatctccgtgcacggcgcaaggagcccttttatataagttgtatatattgtaacgtaatacctaaaatcaataaattcctgttgtattaattagctgctttggaaagagtaaagctataagttcccttattatccttgaagttgtagctacctttaaagcttacgggtaccttaaccaggcaattaccctggtcgcttacacggaaatagagataagaagtcgagctgaatacactgtttccttcagcagtagtagataaggaagctccataaccctgccagttgaacaggtcagtcgaggaagagtatgtagtacctatataaaatactccgccgttattatcaatattaaagttgatggaaacacacaatgcgaattgttctacgaaagcaccgcttctggtacgggcctgatattctgcgatcatcttcacttcttttctgtcaccaccttcgtagtatccttccaaagtttccgattcacagttacggatagtattaccattctgacgaagcgcttcaagcacacttgccatttcttctgcagtcacagaaggtacatcacctactttagagtcaacagttgcagattgtataccatataaagatatcatggattcaaagtttgaagagttgtcttcaaaactatcactttcagcattagaacatgctacaaaagttaatgccaatacacatgcgaaaaagaatttaattgatttcatattagtacctcctaaattttatttgtttttttaatttgtttgcgaactgttgtttgttatttcgtccgcttcttacacttcatattgtttatctgttcatgttccttaggagggaatcttttaaacttaagttgtcttatttatcttttcttgtttgtttgtacactgcaaacataggcgttttattcaatagaaaaaacttttcaggagacaaaatgaatgaattaccactctttaacgaacgaaatacagcttattcaagcacttgaataagatatgcaagtatcaaatcgccgctcatctgcgattcattcaatacgagcggtaaaaacaccacctattaccaacgaattatatgccacctataaaaagaatgatataccaccccacttattaatttccattgaaaggaaagagaagaaagatgaatccaccaattaacgtctattcatataaccgttacttttgcaacatcaacaaacaaaacccatcatgcgatgaaaaagaaaagaatcttatttttgttcgttaccttgtttgcttctaccttattatatagtcaggtagtcggagtgaaaaccaatcttgtaatggacgcgatgaaaattatcaatctcggagccgaagtcggtctgagtaagaagttaacgctggacttgtatgccaactataatccgtggaaatacaaagatcagaagatgatgaagatgctcgccatccagccggaactccgttactggttctgcgacaagttcaatggacactttgtgggattccatgtacatggaggcgtctaccaggctgccgccatcaatatgccctggggcatctggccggaactgaaggaccaccgcttcaaaggcaatttcttcggtgctggtatttcctacggttatcaatggattcttgccaagcattggaatctggaagggaatattggtgtaggttacgcacgtgtcaagtatgagcagttcgaatgcaagacgtgcggtgagaaggttagcgaaggacataagaactatttaggtcccacgaaagctgctatcagtttaatctatttattctaaaacaaaacaaatatgaaaaagatattatgcatactcttttgcctgctgcctgtattgggcgggaaagcgcagacactttatagagatcaggtgcgcatagagaaagaatctatcacacgcaatgaagataacaatgtgctgagcatcgatatggatatcgtgatgcaggagaatctgaagctctcctccaatcatgtcgccaccctcactccgttcctcgaatcaaatggccgcaccaagatactaccttccatcgtagtttacggtcgcaaacgtgaagtagtaagccaacgcaataacatcgctccttcggaaaatacttacagtgttatccgtcgcaagcataataaagaacagattatcaactaccaccagcaattccagttcgaagcctggatgcgtgatgcggaaatgaaactaaatattgatgtatgcggctgctgcgacctgaaagaggagaccagcggtgaattaatcacccgattgaacattttacccgtgcagctacagcccgctatatcctatatcactccacaggcagaagccgtcaagcaccgtgccatagaaggaagcgctttcctcgacttcccggtgaaccaaattatcatccgaccggagtatcgtcgcaacacagtagagctggccaagatacgtgctaccattgacagtgtacgtaatgatgacaagacaacgctcagcagtataaaaattcacggttacgcatcaccggaaggtggatatgccaacaatacccgactggcaaaaggtcgtacacaggcattggtagattatgtgaccagttattacaagttcgacaataaactgatcacttcagagtatacttctgaagattgggaaggattccgcaagtttatcgcagcttcttcattggagaagaaggacgagatactgaaactgatggatgactcgacactggacatagacaagaaagaacgccagatcgctcaattggcaggtcctcaaacttataaatatatattggaagaatgttatccggctttgcgtcattcagactataccgtcaactataccgtacgcgggttcaatctggaagaaaccaaagagattatcaagacacgtccgcaactgttgagcctacaagaaatctatcggattgcgaaaagctgtcagccgggaagcgaagagttcaaccgttcgttccaggtagcagccaccatgttcccggatgaccctattgccaatctgaatgcaggagccatggaaatacagaaaggcggagacctgacaacagcgaagaagcatcttgccaaagctgatcagaaagctcccgaaacgctgaataacctgggagtcatcgcactgctggaaggcgactacgatgcggcagagaaatatttcaatgcagcaaaagccggtggactcaccactcaggctgacaccaatatgaaacaactaaaaagcataagaaattaccccaaagaataacaacaaacaattttaccccaaaacacaaacgcaccacctgagaaggcagtgcgttttttttatatcataatcatcatatcatcggcttaacaatctccacttttaagcccaatgcatcaatgatacgaaagaaaagtccgactcccggctcaagcgctcctttctcaattctagatatataggacttgttggtacctaccttgccgtacaatttgtctaatacagcatccatacttccaacgtcagggtttacttgcataatattcatttttaagttttactgccttttcaatctcactttcgggcgttttttgtgtctttttctgaaagccattaaacaacatcacgatattgccttcatcaaaaataaaaaaagccccataaatattcatggaatgtttttttattttcaagcgtttcagccctttcagccatccgccacaaccgcctgccagcaggcgaaagcggctgaaagccgcccccgaaaaagcaccctttcagccttcagtcctttcagccgggaatttaccggagcgtcggctgatctctggatgtcccgtagaatccgggaacaggaacatagatcggctgattacgcaatccgagattctgcaactttccttcctggcaaattctccggatatgaatcatagccgtagaacgtaccatgccacacaaagattggaaatctctgcgctgcatcatctgatgcgtactgaaatactccttcagcaacatatcaatctctacttccgaaagtttggacgaatgaaaattcttcttcagttgctttaccttaattaatccgatagagtttttcaatttctgatccgaacgaaagcggatagccttcagtttgattttcatattccgtcgtggagtgtcggcggctatctcttccgtagcagtcagcgtggggtaaaaatagccgatgccgtccaaatgcacctgccgtccttctcccaactcctctcccatcacctgcgaaagagcatccagtacagcagtcacatcgacttcattcagcgtacaacgggattgaatcttactcctcatttcgtccgtatctacctgaccattgtaagcaatgcggggatggaatctttttttcttcggttgatccggtgataccgggttctcataccagtcaaataatatagccatagcttcctcttttattaaataagtacttctaatctgttattcctacggaaacttccgatgaaagaagcttcattttcatcggctaatgtgctatggctgcccggctaatggagattagccgattgactaatgaaggatagctgatcagctaatctgcattagcctctgatgtttgcgccttcaaagatacaacagaaaggcaggaaaacctaatgattcctacgttatttcataaacggaagtatttaaaggaatctatcgaaaacacttgcaaatcgctatcccggcattgtaactttgatgcacgaaacttaaaaaaaagaacaaatatgatggaaaaagtaacccaaatgatcgccatgctgataaaggcatggaaaaaagagagcgtatcacagattgacacacctcccgttcccgcaacgcccgaaccgaagcagcagtcccccaacaactccgcctgcctgacggaacgggtcaacacctttctgcaaactcactatgacttccgctacaaccgcctgacggaagaaacagaatttcgcccattaagcggagcaaagaccgaatttcgtcccatcggaaaacgtgaactgaacaccctctgcatggaggctcatgcagagggcatttcctgctgggataaagatgtgagccgatatatttattccacacaaatcggagagtatcatcctttccggctttatatggacgaacttcctccctgggacggcatcgaccggttgactccgcttgcccgacgtgtatctgcactacctctatgggtaaaaggattccacacatggatgctgggactggctgcccaatgggaaggaaagacgggtgtccatgccaacagcctggctcccatcctgatcagtgccgaacagggacggatgaaatcgactttctgcaaatcgctgatgcccaaagtactgcaacgttactatatggataatctcaaactgacatcagaaggacaggcagaacgtcttctgtcagaaatggggctgatcaatctggatgaattcgacaaatatgcagagagtaaaatgccgcttctgaagaatttaatgcaaatgtcgagtctccacgtctgcaaagcgtatcagcgtaacttccgggacttgccgcgcatcgcttctttcatcggaacttccaaccgctccgatctgatgagtgacccgacaggcagccgccgtttcttctgtgtagaagtagaaaagccgataaattgtgagggaatcgagcatgaacagatcttcgcccaactgaaagcggagcttgccgacgggtgtccgtattggttcgacaaagaaacggaacgtgaaatacaacagaataatgcacccttttaccgtacttgccctgccgaagaggtatttctcagttgtttccgcacctcagcctcagcggaagagaaatatctgcgactttctgctgccgatatttataaagaactgaagaaacggaatgctgctgctctacgaggtttcaatccgaaccattttgcgcaagtattgataaaaatgggggtagaacggaagcatacggaatatgggaatgtatatttggtggtaagacgatgaatttcacttgcattatattatcttatataatgtgcctatatcatcaaattttacggattacccatcgaccttctttgcgtcctccttcacgagaaagtatacctttctctgtaagagattctatatcacgtttaatagtccgttctgtcacgtttgtcttttgggacatttcagagatagttatagttccatcagcttgcatgaattcaagtataatctgctgacgttctgttagttctttcgtgacatctttcgtgacatctttcgtgacatacactcgattctcaatatgaaggattagtttcacctgcatcagttccggctgctcaaccaattccggcttcagccaatgcttctcattccacgcactaaggatgagcgggaaacctgagcctaggttttctccgtaacctatcatacggagcatatgctgcattcgttggttacgagctttggattcgccaccagcatagatttgttcaacaggcaatttcaataagcctggattggaaagcacaaagcggtcatcatacttctcgacacgaagaaggccattcagcattaagtcggcatggataatcatattggtaaaagcctcacgcactgccttatgctgtggtgtatcatccttacggataataccatccatttggaatggccttggaatatctcgcgtcaaacggggaactaccatacgaatgaagttgaacagattattctccccatgtaccgtcataggtcagtcggtcactataacgttggtcacctataaggtttgacttgtcaatatagtccatgcgcagataatcaaaacgctcacgtaccggcaaccctttaccaaacatcagaagacctgctatagtcagaccttcagtaccatcttttcggtttacaacatagccaccaagttgcatcaagaactccttatgatcaagactattccaaatatgttctggattattagtcttgaacataacacgataaccctctaatgtcgggatgtcaatatcatccattgtgtaatactccaagaacatacgatcattgccatcctcgtaagcatcgcgcaccatcatctttatcatttgctctgtgcagtgataatcaccttcatggttgcgtctataagtaccacgcatcaagttgttattaatgtaaacaggacgcaaattataatcggcacgtggtacatttatcgctattacctccttaccattaacgctaatcgtctgaacatcctcatcatgtagcagattcacatttactttctcacgactgttaatagtattccataaatccttgcgtattttgtctgcatcctcaacaccagtgattgtgaatctcatcaaagagtctttctctgctacgttttcatatacccccaacaaaagaattccaccattcgtattagcaaatgcagaatatgtttcccacaaagaatttggcacaccattttgtgcctttttgcattcaagcgtaacacgctcaccatctgcaagcagtttatatatatcttgttctgtcatatcttcattttattataatatatttcaaaagaacaaagataagcaatcgattttaggaaagagtaaatttcagcatattcttattgcattcggaaaaaagagagtgtatcaacgccaaacaacgcagctattgccaagtgcccccttttaccgtacttgccctgccgaagaagtatttctcagttgtttccgcacctcagcctcagcagaagagaaatatctgcgactttctgccgccgatatttataaagaactgaagaaacggaatgctgctgctctacgaggtttcaatccgaaccattttgcacaagtattgataaaaatgggggtagaacggaagcatacggaatatgggaatgtatatttggtggtaagacgatgattgaatttggtaacacggctgaaagcactgaaagcgatatttccagtttttaggatagtactttcagccggaatatcgatgaacaaggaggttcatgataaagctgaacaatctgaaccctaatcggtactgtaattctcaatgtgatgcaaagcagtagtaaatcattcaaaacggaatgaacgaaacacaatttcactaactccccatacattagctgcaaattctattcgctatatctaaaatagttgaagaaaataataaaacaacaacagcggtaaatagaaaacataggcggcaaaacattcatttaaccaaaaaatcattcaaaaaacgatcaattcacccatttcaaaagaccatttaaaagattgaaaaattcaccttcaaaattgaaaaaaacaccaattaacgatttcgcatttctcccatacctttgcaatgtcgataaggaacaaaagtttcttgcgaaacaaacaaaagaacaaaacaataaaattagtatataaacaattaaagaaacattgcctattagaaacaaacaaaatcattcctctcggaagttacttctttttccttatataatataagggcttcctattaaaaagaaaatgatgttttaacaaaacaaacgaccctcatcctttagatgactctcctaaaaaaaagaaaaaacaattagcgtattatacatacatagtataatatgcaaaccctaaaaaaaagaattatagcatcacacattaaaatcaaaactaaaatgaaagtaaagaatttattattagcaggtttggcagtagcagccatgacagcttgtagcaatgacgaaatcattgacaatgatggaatccaaacaaatggtgaaaatgcagcaatgcaaatcaatttccagtttcccacaactagagttgtatcagatggtggcacaaatgcaggtatagatattgagtatgcagctactgaaattacagcagttttagagtacactgaaacaaacaaaagaattgttgtaaaaggattaacctttggtcaacaaactgaaagtggtgctagaatatacagcacagagaaattccaagttgaagcaggaaacaatgtaaaggtttacgcatttattaatcctattatggagataccaacaactggtttggagaatttaaaggttggaaaacaaaaattaccaagtgaaggtttggattatatagctgaaacaatagctaaatctggtaattttatgatgagcaatgttaatggagaacctactgtaataaaagcaattgtaggtggaacagataccaatacagcaaacattagcgttgaacgaatcagtgcaaaattaacagaagagacaaagcgctctatagacaacaaatatgaattaacaactcccactttcgtaggaccaaaggtgtatgtacaaattttgagccatacatacactaatctagctgacgattcttatgtacttggtggtagaaatgcagcatggtcgtcattcttacacccatataaaacaggtgaagtaagtgagactgattacagatggttgaatgcaacaggaacaacatacgtactcgaaaatttaggtagtgaatggaatacagcaactagcaccagcgttctttatcaaggacaagttttcttcgaaaatgacggaaatcaagaaatagcaggaacattctacagcagacctaaattacaaagtgatggtgaaacatggaaagttcaaatttacaagaattgggaagaattatgtgcagatgttgatcttactggtattggagaaaatgacgacgtagctttggctaacagaagtatcatgagatatgcaggaggaaaatgctattatcaagcacctatcgagcattttggtgttggagctaatatcgctcgcaataactggtaccaactaaaagttacttctattgctgatttaggttatccgaaacctgtacctccaactcctgaaaatgaaacgaaattaatgatgagtgttactatagctccttggactatccatatcaataatgttggtctttaatcaactataataaattaatttagggagaagtctcttctccctaaattatactccgaaagaagagagtatcacattcaaacaaaacatccgctctttaaaagcataaaaagtaaaaacaatgaaacgaatcctaactaccatacaagaaaaagcaaataacatattgttattcacaatattggctggtgcaattacatcttgtgattccattttggattacaatgagaattgtgacatcgaatattgtgtcaagttcaagtatgactacaatatggaagaaaaggatgtattcgccgaacaagtaagaactgttactctttacgcttttgacgataataacaatcttgttttccagaacaccgatgaaggtgagccattaggagaagaaacctacgcgatgaacgtagatatagatctctcgcaataccacctggtggtatgggcaggattaaatgatgaatcatttgcagtccctttgctatatcccaatcaagctaaaattgacgaattaagagtaaaaacattacgcaaagaagctactcgcagcaccaccgaggatgaaaagggacaatacatagtagacaacagcctacattcactctggcatggagaggttaaaaaaggaactaccactcgtagcggcagacagcaaatcaccgaagtctcattagtaaaaaataccaatacaatccgtgtcgttgtagcacaagtaaaccaatcaggaggacctgtaacccgcttgacacaaaaaactttcgaatgcgccatatacgacaataatggttacatgaactatgacaacacgctattagaagataacttattgacttacaagccatacaatgtcacatcggatgtagtcagtacccgagcttttagttctgcagatgaacctgccaaacaatacaacggtatcgttagcgaaatgagcgtggcaagacttgtggaaagccaaaagccggagttgacaatcaaaaatactgctactcaggaagtattattccaaagttccgacttggtgaaatacttcgaagaagtagatgccgaaaaatataaagatcgtaattattctcttcaagaatacttagaccgagaagataaatatgaactagtgatttttgtagatgagaaattggcactcatcaaaactgtaatccaagtaaacgactggatcatccaactcaatgatatcgaactttaaaataaagcaaaaaatgaaatactctcatttgacatattatctgctagctatcttatgcatgatggcaacatcgtgtgtctcagacggagtcatgggtgattgtccgatcgataacaacgaccaagcagtactaatagaaggtggcaaagtcaatttcgcattaactttcccgacttcttccacacgaggcataaatggctcatcagaaggtttagcaagcgaacgaacaattaacgatgttcaagtatacactttcgtaggaggaaaattcgttgagaaagtaaagtatattctgataagcggcaccaacggagatgcaacccgctttgtagaaggaaaactgacagagacatatatgacaggaaccgctatggattttgtggtaatggtgaatacggaaagtaagggtgtgcaatctcctaccatgacaaaaggaaacagtaaagctgatttatataaacaattggtttatagttatgaaggcaaaaactggtcaacaaatattccgatgtggggagagggaactattgcatccattcaatcgggagaatataatataggagaacttacattgcaacgtgctattgccaaagtgaatgtaacggtgaatgacggtaaaggattggaaaactttgaaatcaccaatgtaagtttacacaattacaataatggcggatattgtgctccgaccaatgcgaatggtcaaccttctatcccaaccaatgttgttaaagcaacaacacctctgtctgcaggctctctgagcggaacgcaaggcaataatattgagaataaattctatattccagaacataagaacataggtgtagataaagctgaacagctctatttgaagatagaagcaaaagtgaaaggacaaataaaatactatgatattatgttcagtgaaaatggaagtgattatgacgttcttcgtaactatatgtatgtattcaatattactaatgtaaaggtggaagtagatgtcaatcctattttagaatatgaagtaaaaatatgggaagaaaaaactgtgaatattccgtcatttaattaatgcaaggaggataatcagatgaaaaagcaaaacaatatattgaaattaataaaaaatataacatacttgacattagcttgtatagcttttaatgcttgtacagatgaagaaatatataaatcatcagagattgtagagggagttcccgtagaggtcggatttaaattcactataccttccatgcagaaagtcagtactcgcggattaagcgatgaaggagaattccaagtaaacgacctgtatgtcctcatcttcaatgccaacaacgaccaggctagaaaaactggaggagggtactataacagtgatctgattaagaatgttattacaggtaaccaagcaaacgggaaagtttcttccggcacactaacattaaaaacaactagtggagaaagccttatctacgcagtagccaatgtaaaaggtaacgatctaggtggtgatatcactgcagcattagagaacgttaattcattagccgattttaaaaagttgtctgtagcattgacaatcaaagcgaatgtggagcgttcgtcgcccgcacttgtgatgagtggtgcttatatagatggaagcacacaaccacaaactggatattgtaacattccggcacagtcaaccactcttagcggaaagattagcctcacccgtctggactcacatattatcttcaagattactccaaacatgcaagctaatggaggaaagatcaaaacatttactccaaaaagttggagagtatacaatgtgcccaataaatcttatatagtagctcaagacgctgatgcagtcggtaatacagcagaagattacgagaatacagaatcttctattaggtttggagaacaaactgataacatttatgatttcgacttttatatgttagaaaaccgaaagaatgccaaaacttatgaaggtagatcaatcgagaattacaaacaacgtgaagaagaggtcaaaactaatgaacataaaaatacaggagaatataaatatgtagaaccttatgcgacctttgtagagattaaggcgcacatggaaattgaaaatgcagacaatgacaatggtatacgagtagccgacgttacttacgtcattcatttgggatatgttgataatgttgcggctgacttcaaaaatgaaagaaataaaaaatatacatataatgtaactatcaataatgtagaagatattgttacggaagtaacagaggagggaaatccggaaaatactccaggagcagaaggtgatatcgtagactcacagactactgtatataatctagacgctcattatggatatttgattttaaaattcaagtactcagaagtgaaagatggattgcaattctatgtaaaaactccttttggagaaacaaataatgacgacaaatcagtagtaggtcatgattgcaaatggctgcgatttgcacgttgcaataacgaatctacattggcaaattatccaaaagatggaaagggattgattaacttgtttgaattaaaagcagatatcgaagatcaataccagaaagataccaataaagataatacatattattatacagtatttgtagacgaatatttttacgaaaataatccgctagaaacttcctctaataataattgggggaacgaaaattgggaagaatttgttaataaagacgaccgctatgcactactaatctttagtccacaaaaaagtccggatggagaaagtagctatgcaagtgcgaaatatatgatcacacaaaaatctatccaaacctattacagcacagaaaaatttaatagtgacaaaactgcgctaggtatggaacatatagatgaaacaggtgtacctaatggatgggaaagcggaagttacggcagttctcaagaaaatggatataagaatacctatcctgtagttaacaacaccaatataagtagctacggaacagaaactctatcaaatggtaagaatacatttacaataaatgatgcagcaaatgctattcaagcatgcatggcacgtaacagagatgaaaacaatgatggaaaaatcagcggctcagaagtaaaatggttcttgcctgccatcaaccagttagttggaatgttcttaggtgcagaaagcttaccaactccactatttggtgatggtgataagcaacctggaacatatacatataataaaaaagaaataggaacttatggtacttaccactatattagtagtgataagcaaagactgtggtcagaagaaggagccacttttggtcccgctgcaggtatactttatgcaaaagcccccgaaaagcttagatgtgtacgtactttaggaatcagttcccaatataatagtacaagtaaaaaggaaggaaagatatataatatgaataatagttatacattccagatggcttatctagataagcaaagtatacgtacctcatttatagagaatggtgaattagatttacatcacaattttagttcttacaatagaccttatactgcattccaagttgccaataaacgaatgacaattgatgggatagagaccagcaacggatggggaggatcgaataatagaccaagacccacaaactgggaatcacttgtaaaaaacagtggactatctcgtagtgtatgtacaaattactttgagaatgctaataagtctgataaaggttcatggagagcacctaatcaaagagaacttatgattatctatcttcaagatccgagtttggtagaataccaagtcacagatgcttatgattatcgatatggttcttttacaagaacatgttggaaattcaacgaaaatgatcattttactgtagataaggacttaataacaaaaggcactgttggttcatttgttcgttgtgttcgtgacgttaaataaataaaacttaaaagtaaatattatgacaccaaaagacatcctgcaactagaatcatcagatatgcgccaagcctatctgtttgaagagaacgggcgctggtatgcttatgagcattcagccaaccgaatcgaaaaatttgtgaaaggctttgtagacttcaaacacaaagtgcaagatgtctgcggtcggataaaagtagaaatcgacctcagtattttggaaaagtgttccatcacgctgtgtgaagattcgctgcttgtacttgattgccctgcagcataaaaaactgtagaagagtataagcttcataactcgtagtaagaaattacacaatatattgtttgttttgtttgtgttcctcaatccactcagaggcagcttgtgaaagtagcgctgagtgggtggggattttttgtgcaaaaagaaaatgaaaggagaacaaatgatgatgacaaataaaaaaataaagattaatggatgtactcctatagaagacttgatcaccgaagattttggtgctataggaacccccgaaagagatgaattcgagcgaggatgcgaagcctttatcatatgggacgaaaaataagtttcacgatttggtgattttgacaggaaaacatggaaacataagttataattcgcgaaatgtcttcagattgcattgcccataagaaaggcttccaacccgtagaagcctttttaacttgtcaaagtgatagcttcatgtcaatgaagcaaaaatgatagctatatttacaaagcttgttttgtttgtgaacaacaattcaccggaagcataagttatgattcgcaggagttcacatgatttgcatatctgattatttattgcgttctttgtattacataaaatgtataacgtaaaagatgaacgacttcgaggaatacataagacagagcgaaccgcataagcgggagaaaggatacgcttggcaaacagccattggcctgcaagctgttgatggtcttaaaccttcggaatatttgaaggaaaaagcccgccaacacattgaaggggatatcactattgacgaggtcaaacaattagttgatagttattacaaatcaaaggttgcccgttcatctagcgaagatcgtacggaagaagccgataaggtctcagccagaataacagagatcctttcggagaatacattcacattctcacctatcgaatacttggctattcatcggcatttatttgaaggcatattcagccatgccggacaaatacgggattacaatattacaaagaatgaatgggtactgaaaggagcaacagtactttatgccagtgcaggaagtatccgcgaaaccttggaatatgatttctctcaagaaaagatttttgattataaaaatctgaatatagatgaggccatcagacatattgcccgattcgtttctggaatatggcaaatacacgcctttggtgaaggaaatacacgcacaacagccgtattcacgatcaaatatctgcatacttttggattcaatttcagtaacgagaccttcgccaaccattcttggtacttccgcaatgctctcgtcagagctaactataatgacctaaccaaaggtgtgtatgccacgaccgaatttttagaaaaattcttcagaaacctgattctcaacgaacaaaatgaacttaaaaatcgaaatctacagatcgacgaaatcgaaaaggaagccattcaaagtgcaaaacagactgatatggatatcccaaagtgcaaaaattgcactttagactgcactttggaagagatagccgtacttaactacctcaaagaaaaaccaaatgcaacacaaaaagaaatagcacagcacataggaaaatctgagagaaccgtcaaatccatgaccgtaaacttaagtgaaagaggtattatagaacgcaaaaacggacgtcgtaatggcttttgggagatcaagaaatgaatatcttatgtgagtgattctttgcatatctgattatttattgtgttctttgtattacataaaatgtataacgtaaaacatgtaatagccatgaagcctaataatcctttcctcgtatacggttacaatagtccggattggtcccaaaattatacaagagtaattgtatattgataacacaggtaattgaacagaggcaatctgaaaatgaaaacttttcgaaacatatctactttttatcacattatctttgtttatctcttataaacctgtatatttggagtattataactgatacatttatattaatacagaattactatgagtcataccatcttcctaatcatcgccctcgtcactacaggaatttttcttattcaattcgtattatccattttcttcggagacatagatgcagatgtggacgtggatgctgatatcagcagcgtagtatctttcaaaggtctcacccacttcgggatcggattcggatggtatatgtacctcgtaggaaatgccgatatagcaagttatgcaatcggaattctggtaggtctgttctttgtctttgccgtatggttcctttataagaaagcctatcaactgcagcaagtgaaccggtctgaagagaccgatcaattggtaggacgggaatgtaccatttacttcaagcaaagtgataacaaatataccgtacagacaaaccgggacggcgccatgcgcgaagtggacgtgatctccgaaaccggaaaagcatatcagaccggagacagaacaatcatcagcagctacaaagacggaactttatacattaaataactattcaaatacacaattttatgacacaagaaatgctaatcatggctgctatactagtggcggtcattctgcttacttttatcggtatcctgtcgcgttaccgtaaatgtaagagtgacgaagtcctcgttgtatacggtaaaacagggggagaaaagaaatcagccaagttatatcacggtggggccgctttcgtatggccgatcattcagggctacgaattcctttctatgaaaccattgcagatagactgtaaactgacaggtgccctatctgcccaaaatatccgtgtggacgtacccactaccatcaccgtagctatcagcacagacccggaagtgatgcagaatgctgccgaacgtatgctgggactgacaatggatgacaaacagaacctgattacggatgtagtatacggtcagatgcgtctggtgattgcagacatgactatcgaagagctgaactccgaccgtgataaattcttgtctaaagtaaaagacaacatcgacacggaacttcgcaagttcggtttgtatctgatgaacatcaacatcagtgatatccgcgacgctgccaactacatcgtcaacctgggtaaggaagctgaaagcaaggctctgaacgaagcacaagccaacatcgaagaacaggaaaagctgggtgctatcaaaattgccaatcagataaaggaacgtgaaaccaaggttgcggaaacccgcaaagatcaggatatcgccattgccgaaaccaagaagcaacaggaaatctctgtagcaaatgcggataaggagagaatctctcaggtagcctttgccaacgcagaaaaagaatcgcaagtggccaaagcggaagcggaaaagaatatccgcatcgagcaggcaaacaccgaaaaggaaagccgtgtcgccgaactgaactccgacatggaaatcaaacaggcagaagctgctaagaaagcggctatcggacgtaatgacgcacagaaggaagtggccttatcaaatgccgaattagccgtcacacaggcaaatgccgacaagcaagccggtgaagccgctgcaaaatcggaagctgccgtacaaactgcccgggaaatcgcccaaaaagaagtggaagaagcaaaagcgaagaaagtagaatcttcactgaaagctgaaaagatcgttccggcagagatcgcaagacaggaggctatccttcaggcaaatgccatcgccgaaaagattacccgtgaagcggaagcacgtgcgaaagcgactttggcacaagcggaagcggaagccaaagctatccaactgaaactggaagcggaagcagaaggtaagaagaggtcattgctcgcagaagcagaaggtttcgaggctatggtcagagcagcagaatcgaaccctgccatcgccatccaatacaagatggtagaccaatggaaggaaattgccggagaacaagtgaaggctttcgaacacatgaacctaggcaatatcaccgtattcgacggaggaaacggaggtacaagcaatttcctcagttcactggtgaaaacagtggccccaagtctcggtgtactggataaactgcctatcggcgaaacggtaaagggtatcatcaatccggaaagcaaaacggaagagaaacctgccggaaagccggaggagaaaaaagaagagaagaagaaataaccaataaattatttcatagagattgcctgccttcattttgaaggtaggcatttttttatatctttgcgagcaaaatattaaaaatgaataaccataaacttcaccttctgcctttatttatattgattacggggcttgtcactctcactgccggctgcaaaaagaaagatatgtctctcaaactgaacgaaccccgcaacatccgtggtgtagtcagttacaaacgttctttcccggatttgaatgataaacatctcgccgtggcccaagccgtcggcatctgcccgccggaagacagggacgctgccgaaaagatgaaagaacagcttatccatatcaccgacaaccaattttacacagtagactctctgacgcattccatcccctatctggtcccccgcgccagcgaattgctcgacaccatcggctccaattttcttgattcactgacagcaaaagggttgaacccaaatcagattatcgtcacttccgtactacgttcgcagagtgacgtgaagcgtctccgccgtcggaatggaaacgcttccgcaaactccgcccattgctatggcgcaacctttgacgtcagctggaaacgattcaaaaaggtggaagacgaagacggacgtcctctgcaggatgtcaatgccgataccttgaagctcgttctgtctgaagtgttgagagacttgcgccaagccgataaatgctacataaaatatgaattaaaacagggatgtttccacatcactgcacgatgagtataaattgcaataaaattcacccgtaaacagccgaagaatccaaaacgtttcactaaatttgcagaaatttttctttaatacgattcaatgatagagaaactgattgttcttgaggatattgacccggttattttttacggcgtaaacaacgccaatatacagttaattaaagctttatatccgaagctacgcatcgttgcccgcggcaatgtcatcaaagtgctgggcgatgaggaggaaatgtgtgccttcgaagaaaatatcaccaaactcgaaaaatactgtgccgaatataattcgctgaaagaggaagtcatcatcgacattataaaagggaatgctccgcaagcggaacagaccggaaatgtgattgttttcagcgttaccggcaagcccatcatcccacgaagcgagaaccagctgaaactggtggaaggctttgccaaaaacgatatggtattcgccatcggtcccgccggttcgggaaagacatatactgccatagccctcgccgtccgtgcgctgaaaaacaaagagatcaaaaagattatcctcagccgccccgctgtagaagccggagaaaaactcggtttcctgcccggagatatgaaagataagatcgatccgtatctgcaaccattatatgatgctctgcaggacatgatccccgctgccaagttaaaggaatacatggaattgaacattattcagattgctccgttagcatttatgcgcggacgtacgctgaatgacgcagtcgtaatcctcgacgaagcgcagaataccaccacacaacaaatcaaaatgttcctcacccgtatgggtatgaataccaaaatgatcgttacgggagatatgactcagattgacctccccgcctcacaaacttcgggactggtgcaagcactccgcatcctgaaaggggtaaagggaatcagctttgtagaattgaacaaaaaagatattgtacgccataaactggtggaacgcatcgtagatgcttacgaaaaattcgacaaggaggcgaaagccgaaagggagaaacgaaagaatgaacaacaggttatcaacggtgaacgaccggtgaaacaggtcaacaactaatcgtttctgtgatttgtaacttgtaatttgtaattataataagacaatgaaagcattaacaaaaacagatttcaactttccgggacaaaaaagcgtgtaccacggaaaagtgcgcgatgtgtacaacatcaacggcgaaaaactcgtcatggtagcaaccgaccgtatctcggctttcgatgtggttttacctgaaggtatcccttacaaaggccaaatgctgaatcagattgcagccaaattcctcgatgccactactgacatctgtccgaactggaaaatggctacgccggacccgatggttactgtcggagttttgtgcgaaggctttccggtagaaatgattgtacgcggatatctgtgtggtagcgcatggcgtacttacaaaagcggcgtacgcgaaatctgcggtgtaaaactgccggatggtatgcgcgagaacgagaaattcccggaaccgatcgttaccccgacaacgaaagcggaaatgggactgcacgacgaagatatctctaaggaagaaatcctgaaacaaggacttgctactcccgaagaatatgaagtccttgagaaatatacactggctctcttcaaacgtggaactgaaatcgctgctgaacgcggtctgatcctcgttgatacaaaatatgaattcggtaagcacaacggtactatctatctgatggacgaaattcatacaccggattcaagccgttatttctactctgacggctatcaggaacgcttcgaaaaaggcgaacctcaaaaacagctttctaaggaattcgttcgtgaatggctgatggagaacggtttccaaggcaaggatggtcagaaagtacctgaaatgactccggctatcgtacagagcatcagcgatcgttacatcgaattgttcgagaatatcaccggtgagaaatttgtgaaagaagataccagcaacatcgctgaacgtatcgaaaagaacgtaatgaatttcttgagcaaataagcatggattacccacaacaacatatcaagccttacaacgaagacggtaagaaaaccgagcaggtggaacgcatgttcgataacattgcgcatgcttacgacaaactgaatcataccttatctttaggtatagaccgcagctggcgccgtaaagccattgcctggctccgccccttccgcccacagcacatcatggatgttgccaccggaacgggagactttgccatcctcgcttgccgtgaactgaaacccgatgaactgatcgggacggatatctcggaaggcatgatgaacgtgggtcgtgaaaaagtaaagaaggaaggactctcggacaaaatttcttttgcccgggaggactgcacttctctctcctttgccgacaatagatttgacgctatcaccgtagcattcggtatccgcaattttgaagacctggacaaaggtctctccgaaatgtgccgtgtactgaaaccgggcggacatctggttatcctggaactgactactccggatcgcttccccatgaagcaactgttcgccatctactcgaaagtagttatcccattgcttggcaaactcctctccaaagacaacagtgcctaccattatctgccggacactatcaaagtatttccccaaggggaagtcatgaaaggagtcatatcgaaagccggattcggcgaagttcatttccgacggttgacatttggtatctgcacactttatacggcgacaaaataatgaagaatgatgaataattaatttaatcctttcgtgtcatggaaaaatacggtttaatcggctaccccttgcgacattcgttttcaatcggctactttaacgaaaagtttagatccgaaggcatcaatgcggaatatgtgaatttcgagattcccaatatcaatgactttatggaagttattgaagagaatcccaacttgtgcgggctcaatgtcaccatcccctacaaagagcaagtgattccttttttgaacgaactcgatcgggatacagctaaaattggcgctgtaaatgtcattaagattatccgccaaccgaaaggaaaagtaaaactggtcggctacaattccgacatcatcggttttacacaatctattcagccgttgctacaacctcagcacaaaaaagcactgatcctcggcaccggaggtgcttccaaagctgtttaccacggactcaaaaatctgggtatcgaaagcgtatttgtatcgcggacgcacaaagccgacgatatgctgacttacgaggaactgactccggaaatcatgaaggaatacaccgttatcgtcaactgtactccggtaggaatgtaccccaaagtagatttctgccccaacattccttacgaactgctcactccaaaccatttgctctacgatttgttatataatccaaacgtcactcttttcatgaaaaagggagaagcacaaggggctgttacgaaaaacggtttggaaatgctacttttacaggcatttgccgcttgggaaatatggcaccgataagataaaggtgctgacagccgttttctgatagagttaagaataagggcgtgatattttaattgaggggatttattatgaagaaaagagcagtctacagcattattattatcatgctggtatttaccagttgcacaatcggcgggagtttctatatgttgaatttctccttgacgccgaatgccaaaatattgtctaaagacgccgattcatatccctatatgtacagaaactatcctttcctgcgcccgtgggtggatagcctgaaacaagtgaatgcactgaaagatacattcattatcaatccgcaaggcatacagctacacgccttttacatcgccgcacctgctccaaccagtaaaacggctgtaatcgttcatggatacaccgataatgctatccgtatgtttatgatcggctatctgtataatcgtgatctgggatataatatcctgcttcccgacttgcaacatcagggagagagcgaaggacgagccatccaaatgggatggaaagacagaattgatgttttgcaatggatgaacattgcaaatgaaatctttggagacagtactcaaatggtagtacatggtatctcaatgggaggtgccaccacaatgatggtatccggcgaaaaacagaaaccttttgtgaaatgttttgtggaggattgcggctacaccagtgtatgggatgaattttcgcacgaactcaaatcttccttccacctgcctgctttcccgttaatgtacactacaagctggttatgcgagaaaaaatacggatggaacttcaaagaagcttcctcacttaagcaggtagagaaatgtgagctgcccatgctgtttattcatggagacaaagatacatatgtccccacatggatggtttatccgctttatgaagcaaagccggaacccaaagaactctggatcgtaccgggagcagcccatgccctctcgtacaaagagaataaacaggaatacaccgacaaagtacgggatttcgtcgggcggtatatttattaaaactattatgaaatcaatattgacacttatacttgctacttttctactgattccactgcaagcccaagaaaaggtatatacggtagacaacttgccaaaagtacatctgcaaaataaaatgcagtatgtatgcaatccggcagggatactttcgcaagctgcttgtgacacaatagacactatgctccacgctctggaacaacagacggggattgaaacggtagttgccatagttccttcgattggtgatatggagtgttttgatttttgccatcagctgctcaatcaatggggagtaggcaagaaaggaaaagataacggactcgttatcctgttagtcaccgaccaacgctgcatccagttttacaccggatacggtttggaaggggtacttcccgatgcaatatgcaaacgtatccagactaagtacatgattccatatctgaaagacggcaactggaatgaaggaatggtagccggaatccgggcgacttgccagcgacttgacggatcaatggaaaatgaatcgctttctgaatcgaataatgaatcgatggatttcattttcgctgttatcctgttcgctgtaatcggtgtagggatagcgttctttgccgcaagaaatcagagccgttgccccaaatgcgggaaacatgccctgcaaagaaccggaagcagacttgtatcacgtgtcaatggggtaaagacggaagatgtcacctatacttgcaagaactgcggaaatacaatcatacgtcgtcagcaaagctacgatagcgactatcacaacagagggggtggcggaggcggtccgttcatcggcggattcggaggcagtggcggaggctttagcggaggcagcttcggtggaggaatgggaggcggcggtggagccggttcacgattctgatccctacagataatattaaataatcaaatactcatcaaaaagtaagaaacatgaaaaagtcaattatcatcattttagccgttgtggctatccttgtcatatgggtagtcagtgtatataacggtcttgtcaccatggatgagaatgttagcggacaatgggccaatgtagaaacccaataccaacgtcgcgcagacctgatacccaatcttgtaaacaccgtaaagggatatgcttctcatgaaaaagagacattggaaggagtggtagaagcacgtagcaaagccacacagatcaaagtggatgccgaaggtctgactccggaaaagctggcagaatatcaaaaagcacagggtgctgtaacgtctgcacttggcaaattattggctatcacagagaattatcctgacttgaaagccaatcagaatttccttgaattacaggcacagctggaaggtaccgaaaaccgtatcaatgtagcccgtaaaaacttcaatgatgcggcacaatcgtacaacaccaatatccgccgtttcccgaaaaacatatttgcagggatgttcggattcgacaagaaagcatactttgaagcggaagaaggaagcgaaaaagctccgaaagtagagttctaaaggatgatttcttaaagaacttccaagctaaaatcggaatcgccgttacctgatttattcagataacggcgattccagctcttaaccaccacgaaaggacttccataaaagagcgttaaaaaggaacttttgctcctgtctctttaacggtttaactagtctctttccactatcaatcagcataatgattaaaataatacgaaccattaattaacacttttatgttttattcttcttccggacgaagcttgataaacaaatagttggctgtacgaaaaaaaagcagtacttttgcagccgtatacaaaaaataattctttaactcatgagtaatcaacgatacatgatgcggggcgtaagcgcatcaaaagaagatgtgcacaacgccatcaagaacatcgacaaaggaattttcccaaaagcattctgcaaaattattcccgatatactgggtggggacccggaatattgcaacatcatgcacgccgacggcgccggaaccaaatcttcccttgcttatatgtactggaaagaaacaggcgatttgtctgtgtggaaaggtattgcacaggacgcattgattatgaatatcgacgaccttctttgtgtaggcgctgtagacaatatcctcgtttcttcaactatcggacgcaataaactgttgattcccggcgaagtaatctccgctatcatcaacggaacagacgaattgctggctgaactccgtgaaatgggtgtaggcgtatatgctaccggtggcgagactgctgatgtcggcgacttggttcgtactattatcgtagactctaccgtaacctgccgcatgaaacgctcggacgttattaacaatgccaatatccgtccgggagatgtcattgtaggccttgcttcttacggacaggctacctatgaaaaagaatataacggaggtatgggcagcaacggtctgacaagtgcccgccacgacgttttcggcaaatacctcgcagagaaatatccggaaagctatgatgccgccgtacctgaagaactggtttactccggaggattaaaactgacagatactgtagaggattctccaattgacgcaggtaaactggtactctctcctacccgcacctatgctccggtagtgaaaaagctacttgacaccttacgtccggaaatccacggtatggttcattgctccggtggtgcgcaaaccaaagtgctgcatttcgtagaaaatgtccgtgtagtaaaagacaatcttttccctgttcctcctctgttcaagactattcaggaacaaagcggtacagactgggcggaaatgtacaaggtattcaatatgggacaccgtcttgaagtttacctgtcaccggaacatgcagaagaagtgatcgctatttccgaatcattcggcattcctgcacagatagtaggacgtatcgaagcgtgtgaccagactgaattaatcattaaaagcgagttcggagaattcagatactaaagaatggcagataacagtaccatattagaaaaactagacggacttgtagcccgttttgaagaaatatctaccctcatcaccgacccggcagtaattgccgaccagaaacgttatgtcaaactgaccaaagaatacaaggatctggatgacttgatgaaagcccgcaaagaatatatccaactgttaggcaacatcgaggaagccaaaaacatcctttcgaatgagtcggacgctgacatgcgtgaaatggcaaaagaggagatggacaacagtcaggaacgtcttccggcattagaagaagaaatcaaactaatgctcgttcctgccgatccgcaagacagcaagaacgccatcctcgaaatccgtggtggtgcaggaggagacgaagccgcaatctttgccggcgaccttttccgtatgtatgccaagttctgtgaaaccaaaggctggaaaatggaagtatccaatgcaaatgaaggaacagccggaggatacaaagaaattgtttgcagcgtcacaggagataatgtctacggaatattgaaatatgaatcgggtgtacaccgcgtacaacgtgttcctgccacagagacacaaggacgtgtgcatacttccgccgcttcggtggccgtactccccgaagccgaagaatttgacgtagtcatcaatgaaggagaaatcaaatgggataccttccgaagtggcggtgcaggcggacagaacgttaataaggtagaatccggtgtacgcttgcgttatatctggaagaacccgaatacaggcgttgcagaagaaatcctgattgaatgtacagaaacccgtgaccaaccgaagaacaaggaacgcgccctggcacgactccgtacctttatctacgacaaggaacatcagaagtacatagacgacatagcttccaaacgtaagacaatggtatctaccggcgaccgctcggctaaaatccggacatacaactaccctcaaggacgtatcaccgatcatcgtatcaactataccatctataatcttgccgcttttatggacggagatattcaagattgtatcgatcacctgatcgtggcagaaaatgcggaacgcctgaaagaaagtgaactctaaaaattatagtatagacatgaataaacaacagctatttgaaaacataaaacgcaagaaatcattcctttgcgtagggcttgataccgacatcaagaagattcccgaacacctgttgaaagaagaagatccgatcttcgcattcaacaaagcgattatcgacgcaacagccgatctgtgtatcgcttacaaacctaatctcgctttttacgaaagtatgggcgtgaagggctggatcgcatttgagaaaacagtaaaatacatcaaggaaaactatcccgaccagtttattattgccgacgccaaacgtggcgacatcggaaacacttctgccatgtatgcccgtactttcttcgaagagctggagatagattccgtcactgtagctccttatatgggtgaagacagcgtaactccgttccttacttacgaaggcaaatgggtgatcttactggcactgacttctaataaaggttcccacgacttccagttgacagaagatgcaaacggcgaacgtcttttcgaaaaagtactacgcaaatcgcaggaatgggcaaatgacgaacgtatgatgtacgtagtcggcgctactcaaggacgtgcttttgaagatattcgtaagattgttcccaaccacttcctgctcgttcccggtgtcggagcgcaaggcggttcgctcgaagaagtttgcaaatatggaatgaacagtacctgtggcctgattgttaactcttcccgtggaatcatctacgttgataaaacagaaaagtttgccgaagctgcaaggcttgccgcccaagaagtacaggtgcaaatggcagagcaactgaaagcgattctttaaagagaaggaatgccttacgaaagaaagataatcaacgatccggtattcggattcattaatatcccaaaggggttactgtacgatattgtacggcatccccttttgcagcgtcttacccgcatcaagcaagtaggactctcgtcagtagtataccccggcgcacaacatactcgtttccagcactcactaggtgcgttctatctgatgagcgaagctatcacccaactgacctccaaaggtaactttatatttgacagcgaagctgaagccgtacaagcggctatcttactgcatgacatcggacatggtcctttttcgcatgtgcttgaagatacgattgtacaaggagtttctcacgaagaaatctcccttatgctgatggaacgaatgaataaagaaatgaacgggcaacttagtcttgccatacagatctttaaggacgaatatccgaaacggtttctgcatcagctcgtcagtggtcaattggatatggaccgcctcgattatcttcgtcgtgacagtttctataccggtgttacagaagggaatatcggttctgcccgcatcatcaagatgcttgatgtggccgacgaccgtctcgtaattgaatccaaaggtatctactctatcgaaaatttcctgacagcacgtcgcctcatgtattggcaggtatatttgcacaagacatcggtagcctatgaacgaatgcttatcagcacgttgcttcgtgccaaagaactagcatcacagggagtagaactgtttgcttcgccggccttacatttctttctatataatgacattaatcatacggagttccataacaatcccgattgtctggaaaatttcatccaattggatgacaatgatatctggactgccttgaaagtatggagcaaccatccggataaagttctttccacacttagtctgggcatgattaaccgaaatatctttaaagtggaaaattctgccgaacctattggtgaggacagaataaaagagttaactttgcaaatcagccagcaactaggcataaccctttccgaagcgaactattttgtctctacccccagcatcgaaaagaatatgtacgacccggcagatgacagtattgatattatctacaaagacggcactatcaaaaatattgccgaagcatcggacatgctaaacatctcattattgtccaaaaaggtaaagaaatactatctctgctaccagcgattgcatagataagtataaaatattcattcaataacacggaaatctgaaaaaaaaatccgttatttgtgaactaatttaatttaaaataaagacatggagttctcggctaagcaaattgcagcatttatccaaggggaaatcattggagatgaaaacgcaacggtacacacattcgctaaaatagaagagggaatgcccggagctatttctttcctgtcgaaccctaaatatacgccttatatctacgagacacaatcaagcattgtattagttaataaagattttgtccctgaacatgagattcgggctactctgatcaaagtagacaatgcttatgaaagcctggcgaagctgcttaacctctatgaaatgagtaaaccaaagaagcaaggtatcgattcactggcttatattgcccccagcgccaaaattggcgagaacgtatacatcggtgcctttgcctatatcggcgaaaacgccgttatcggagataatactcaaatttacccgcatactttcgttggagacggtgtgaagataggcaatggttgtcttctttactcaaatgtaaatgtttatcatgactgccgtatcggtaatgaatgtatccttcactcaggtgcagtgatcggagccgatggattcggtttcgctcccaccccgaacggatacgataagattccacaaatcggaattgtgatcctggaagacaaagtagatataggtgccaatacctgtgtagaccgtgctacaatgggagctaccatcatacatagtggcgctaaaattgataatcttgtgcagattgcgcacaacgatgaaattggctcacacacagttatggcggctcaagttggcatagcaggctctgccaaaatcggagaatggtgtatgtttggcggtcaggtaggtattgccggacatatcacaatcggcgaccgggtaaatctgggagcacaatcaggtataccaagcagcatcaaagcagacagcgtactgatcgggactcctcctatggaaccgaaagcttacttcaaggctgccgttgtgactaagaatttgccggatatgcaaaaagaaatacgcaatctgcgtaaagaagtagaagaattaaaacaactattaaataagtaaataagtaaccaatgctgaaacaaaaaacgctgaaagatagcttttcactgagcgggaaaggtcttcacactggacttgatctcactgtaacttttaatcctgccccggacaatcatggatataaaatccagcgtattgacctggaaggacaaccaactatcgatgcagtagccgacaatgtgacggaaacaacccgtggcacagtattgtcaaagaatggagtcaaagtaagtaccgtagagcatggtatggcagccctttatgcattgggcattgataactgccttatccaggttaatggtccggaatttccgattttggacggtagtgcacaatattatgtacaagaaatagaacgtgtaggaacagaagaacaaagtgctgtcaaggatttttatatcatcaaatctaaaattgaattccgggacgaatcaaccggctcttctatcatcgtgctaccggacgagaattttagtctgaatgtactcgtttcctacgattcaaccattatcccgaatcagtttgcaacacttgaggatatgcacaatttcaaagacgaagtggctgccagccgtactttcgtctttgttcgtgaaatagagccgcttctctccgccggcctcattaaaggtggtgacctcgacaacgcaatcgttatttacgaacgcaaaatgtcacaggaaagctatgacaaactggctgatgtaatgggtgttcctcacatggatgcggatcagttggggtacatcaatcacaaaccactggtttggccgaacgagtgtgcccgtcacaaactgctggatgttatcggtgatcttgcattgattggtaaaccgattaaaggtcgcatcattgctacccgccccggtcacaccatcaacaataagtttgcgcgtcagatgcggaaggaaattcgcctgcatgaaatacaggcaccgacatacgactgtaaccgcgaaccggtgatggacgtaaatcgtatccgtgagctattaccccaccgttatcctttccaattggtagacaaggtaattgagatgggtgccagctatatcgtaggtatcaaaaatatcacagcaaacgaacctttcttccagggacatttcccacaggaaccagtgatgccgggcgtacttcaaatagaagcaatggctcaggtaggcggtttgctcgttcttaattctgttgacgaaccggaacgttattctacctatttcatgaagatagatggcgtaaagttccgccagaaagtagtaccgggagatacactgcttttccgtgtagaattattagccccgatccgtcgtggcatctccacaatgaaaggttatgcattcgttggcgaaaaagtcgtttgcgaagcagaattcatggcacaaatagtaaaaaataaataaaaccaaaaacatggtaagtcctctagcgtatattcatcccgaagctaaaatcggagaaaatgtagaaattgcgccttttgtatttattgataaaaacgtagttattggcgataacaataagattatggctaatgtgaacatcctgtatggttcacgcattggtaatggaaatacgatctttccgggtgctgttatcggagcagttccacaggacctcaagtttcgtggagaagaatcaactgctgagatcggagacaataatctgattcgtgagaatgttacagtcaaccgtggtacggcagctaaagggcgtaccattgtaggaagcaacaacttattaatggaaggggtgcatgtagcacacgatgcactgatcggtaacggatgtattatcggcaactctaccaagatggcaggtgaaatcgttattgacgacaatgctattatcagtgccaatgtattgatgcatcagttctgccatgtaggcagccatgtaatgattcagggcggatgccgcttcagtaaagatatccctccttatatcattgcaggacgtgagcccatagctttcagcggtatcaacattatcggccttcgtcgccgtggttttgccaatgaagtaatcgaaagtattcataacgcttaccgtatcatttaccaaagcggtctgaatacaacagatgcattgaagaaaattgaagatgaagttgagaagagtccggagattgactatatcgtcaatttcatccgtaattcagaacgtggtattattaaataaacagttcaaaatagtcatattatgatatacagatttactatcatatctgatgaagttgacgattttgtcagagaaatacaaattgatccggaagctacatttcttgacttccatgaagcaatactgaaatcagtagggtacacaaacgaccagatgacctccttctttatctgcgatgatgattgggaaaaagaaaaagaagtcactttggaagaaatggacgacaatccggaaatggatagttggataatgaaagagactactatcagcgaactggtagaagatgaaaagcaaaaattgttgtatgtattcgactacatgacagagcgttgcttcttcatcgaattgtctgaaatcatcaccggaaaagatatgaatggtgccaaatgtaccaagaaatcgggtgatgctccgccacaaactgtagattttgaagaaatggctgctgcaagcggttcactcgacctggacgaaaatttctatggtgatcaggactttgatatggaagattttgatcaggaaggcttcgacataggtggtaacgcaggtggctcttatgaagaagagaagttttaagtattaagtatcaagtattaggtattaattgctatgcagtgacaagcagttaatacctaatatttttatccccgacactttaatacttaacacctaatacttaatactttaaaatccatgcccactctcattgttttaatcggacctacaggagtaggaaaaacagaattaagcctgcgactggcagagaactttcacaccagcattgtctctgctgattcgagacaactttatgctgaattaaaaataggaacagcggctcctaccccggatcaattaaaacgcgtgcctcactatttggtaggtactcttcatcttaccgattattacagcgccgctcaatatgagcaggaagcgatggaaatcctccatcaattattcacagaacatgaggtagtagtacttacgggtggatcaatgatgtatgtagatgccatctgcaaggggattgacgacatccctaccgttgatgctgaaacacgtcaggtgatgctgcaaaagtatgaggaagagggattggagcaactttgtgcagagctccgtttattagatccggactactatcgcatcgtagacctgaaaaacccaaaacgggtgattcatgcattggaaatctgttacatgaccggaaagacatatacttctttccgcacccaacagaaaaaggaacgccctttccgcatccttaagatcggattaacccgtgacagagaagaactgtatgaccgcattaatcgtcgtgtagaccaaatgatagaggaaggattactggacgaagtacgttccgtactctcctaccggcatctaaactctcttaataccgtaggttacaaagaactgttcaaatatctggacggagaatgggaactccctttcgctatcgaaaagatcaagcaaaattcacgcatttattcacgcaaacagatgacatggttcaaaagggatgaagaaatacgctggtttcatccggaacaagaaacggagatacttgagtacctcgcacaaattattgaaccggaccattgatattttctctaaagttgacaactctttgttactgcccccaataatccacacatttacacaaaatattttatagtgccaaacagaatccagttataagtagaacttataactgaatcctgtttccatttacacaaaattttggactgtgtcgctcaaagtgtctagttgcatcagtctttgtagacgatgaagctccatacattgtaatagtgactccttccataggcttttcttccttatccattacatatgtgccatttcaggagtgagttttgacttttaatttatttgcctaattccggtactttctgataaacttcacgatagacattattacctaattggaataggagcgtcattctcttcccatttatgcgataagatataggcacaagagcatccgccgcacttccatactcattacgcagtttctcacaataaacacctttgccaatgatgctgtactcacctgaacgagtgattttgtaagggcaaaatatgccttcagaactgcggctgtccgaattgagatcaacagcatttttgatgtaagcatccacattatagtagttaccacctttgtcaaacaccttgtacctagtagttacgtgagcagtgttgtcatcctgaatgagtttccaaattccttttaagttttgccccatacaaaaatcagacactagaaaaaggaatgaaacggctaataaaattttacataatttttctttcatgataaattggattttaagttaaacaaaaacgttacaacaggaagaagagacgggcgatcccaccccgatcctccttatactaatcttttaaaatgacctcaagtataggtttcactttaacctcaatagcggtttgattgttatctcccaccagaagcacaccatttttaggagctctaattgcaaaagagccgtctgtattagttctggtaatatcatttgctccttttactctaattgaagcagcaattctcttaccatccgcatccttcacaacacctactacaggaacccaatcagaacgatatttttctgttttcagacgtacaattttcttcttatcaaagtgatctaacgaaacagaatttatcgtcttagtagacattcctttcaatttttttttcttgacctcttcgtcatttatacaataaatgatttccccctctacatcttttgctacactttcggctagttccaaggcatcagcatacggcttcttcgagttagctttttgaaaatcgtactccccttcagtaagtaaagtgacaattatcactccatttttccctttttctccataaacagtttcagctgacttatctttcaatatagaaaaacttttaatacggtcaggagaaagtttggatagagcatcttcttccaatgcttccttgccatcaataatcactaagggaggttctccatccttaattccatgaatagaaagtcctcttattcctttaacatcggaagacaaagttgcgctagccttcaatttgccagacgtttcaggaaacaatctaactacctcttgttccaactgaacagacattgtaggactgacaggagccttcaccgtcttataccctataaaggagaaccatatactacccctattctgtgttttcaactgaaaacgtccattcgcatccgtcattgtacctatattcgtattgggaacaaccacgctcactcctgctttcggacgtctttgttcgtccaccaccgttcccgtgacggcaatctcttctgcagtatttgtttcaactgtttctttctcaataaaagccaccgctttcatatcattgcccagctttccgtttttttgagtactgacaagtatcactccattcgccccacgcttaccgtataatctaatagaagcactatctttcagtactgaagcgctctctattactcctttatccattttatcgaaagcatccatactcgtttctctaccgtcaaccagaatcaagggtttcttattttcctggaatctgatatctccaaatcttacagaaacggaatatttcacaggtacaggcataccacgctgtttgcctggtatccaatccggcatctcgcgcacaatcctttcagcttccttacttaatatagactggtctgatggagatgctttcacattctctacttttccggtcttcgctactgtaaaaccgactgtcacgcttcctcccgctttaccttttgcgctggaattttctgttttatccttcagatacttactcaatgcagccgtaccacctggaaattccggcatctgctccaccacctctaaaacaattacctcgctatctttcgatactctccctccaatcccgatttcctcttttttctcgtttttcgatacttttactgtatctcccaacacattctcttgcataaaactaaccaaatcattaactttgacggcagaaatctcgtcagccttttcagagatttcgggacgggcaaaagcggttactgcaatagcagccaacggaagcacatacaagtacttcaaacgcgcccaaggattcgatttttcttttaacatcatagtgatacgttttttaagtttactgtgattaaagctgttggccatagagtagagccttgtgccaacggctttttttattaataataactgatattcctttgcattcaccccttcattgataacggtttcatcggcttcgtattcatgaatattctgtaattcctgtttgagcagccatgctccggggttgaaccattgaaaaaagatacaaatatcagcaatcagcaaatcccacgaatggcagttacggatatgcgctgcttcatgaatcagaatttcccgtccattctcttccaaatcttcccggctaatgacgatatatatcatccagctaaatggagctattgctctgtcgtgcaccaccagcgtaataccgctctccagtttctcccgcttaccggaacagatcagtctgagcaggcataacaaagaatagacatttcggcagacaaggacaacaatccccgccaaatagatcaataaagctatttgtatccaagaaagaaaaacgggagcaggtgccagttgccactctccggcttcgatttcaacgggagtagtattctccatttctgccttcatcaatagttgttcgatggaaagaacagcctgctgcacttcaacctgatgccgcgtagtcatttcgatgcaaggaatgagtaatgaaaaaagcaatactcccagcaaagcaacacgattaaagcgatgaaatgtctccctgctcagcaataatttgaaaaacagataaaagagaacaagacaaacggctgattttagtatataaatgaagaaagctcccataatacaaagtttatttattgatacttccggttccgctgattcttactcctgtgccagttgttttttaaattcatcccaatagttcggattctttttagaaacgagcacccaaattccattcttagctttcggaccgaatttcttttccaaacctgtactttcgggtaaaatgatatgcgtttccacaatatcctcctttgccagttgcatgaactgctggtaagtaatttccttgccatccaacaaaataagttggttattataccctattcctccttcttttttaccatacatatcaaaaaagtcttctacgtcattcgtttcaatgactattcgggaagtagttgttgcagaagaagttacaaaagagtcagaagcattggaagcagccttattcgccttgttttgcttctctccataattctcattcaatgactttaacatccctttttttgcttcctcaataaaactctgcaaacgttctgcagtccatggaacagaggaagaaagacgcaatacatctcccttatcattttcatatgtagccttcgttcgtattaagacattcccattctgataagtttgtgcactggcccagccaaatccttcgggcaaacgtaacttttcagagtccaatcgcactatctgcactgtatccgattcggcatagctttcttttaccggtatctctccaaagtgtaatacggttcgcaaagaatcagccgaacaagcaggcaaggtatcattggagacaacactgctcgtttctttataagtaccggctgatacattgcaagtaaaaaggagcattgacacaacagccaatggcatagcgatcaaatatttcaaccgtttcatagaattagatttttcttttactatcatgtttatttgctttttaagtaaaccttaattccgcaacactattataaattaaactttttaagtacctgagcaacaaaaagttgctcaggattttgccatgtcagaattttcacttatcttagtgttgcaaaaaaaacaagagaatccgacgatagacatggcgaagatacaaattaaatctgagagactcactccttttgggggattattttcaatcatggagcaatttgactccacattatcatctgtaatcgactcaaccctcggtctaaggtgtagatcgttcggttatcagtacagcgaaatcatccgttctctcatgagtatctacttctgtagcggttcatgtattgaggatgtcactactcatttgatgaaccacctctcgcttcatccgacacttcgcacttgtagctctgatactatcctcagggcgataaaggagttgacgcaagaaaacatttcatacacatcagatatgggcaagacctacgatttcaatacggctgacactctcaatactttattgctcaattgtatatttgcatctggccaactgaaagagggtgagatgtatgatgttgatttcgaccatcagttcatagagacagagaagtatgatgcaaagcctacatacaagaagttccttggttatcgccctggcgtggcggttattggcgatttgatagtcggtatagagaatagcgatggtaacacaaatgttcgtttccatcagaaggacacgctgaagaggttctttgcgagatttgaacagaatgggctcactatcaatcgcttcagagctgattgtggatcatgttccgaggaaatcgtggaggaaatagaaaaacactgcaagtccttctatatccgtgctaaccgctgcagttcgatctacaatgacacctttgctctcaaaggctggaaaactgaggaaatcaatggcattgagtttgaattgaactctatccttgttgagaagtggaaaggtaaggcatatcgacttgtgattcaaagacagaaacggatggatggtgtgcaggatttttgggaaggagaatacacataccgttgtatcctgactaacgactatgattcttccgtaagagaaattgtcgagttctataaccttcgtggaggaaaggaacgtatcttcgatgatatgaacaatggtttcgggtgggacagattgcccaaatccttcatggcagagaacacagtgttccttcttcttacagcacttatccgtaacttttacaaggccattattcaaagacttgacgtaaagaagttcgggctcaatgcaacaagtcgcataaaagcgtttgtcttcaggtttatctctgtaccagccaagtggatcaggacatcaaggcggtatgtgctgaacatctatacctgtaataatgcttacgcagatgttttccagactgattttggataatgcctacaacttatgggaatgatattgtgtattgcctcaagtcacattgtggggtaaggggatattgtaggcagaagtgggtgcttcaagttcaaattatctgcaaattcagtaatgagaggacgtgtaaacgcaataaggacgttcaagggcttagttgcggatttgagggtaaattgtgtttccgattatgagcttacttctgatgtgcctgctccacttcctgaatcagttgcttcagatcatccaaagaaatatcctcctctttgaccaaagatgaaacagcactcaaatatgaattattgaaatacttgctgattacattccgcaatgtccctttacgaaaatcttcttcgctgacaacgggatagtactgataagtattcccaaaagtatgatgagctagaaatcccttatcttcaagcccgcgaacaatcgtagataacgtattgaaatgaggctttggttcctcatagaaagccaacatttctttcacaaacaaagggcctttctcccagaaataccccatcaattcctcttcttttactgttaatcctttcatatttacaacattgtttgctgcaaataacgagaagttttagttcataaactaattttcatagttaaagtaaactaaatgctttagtttatcttcttttctaacaaccgtaacaaggtatacctatttacatattggcattaaactcagattctatcgggatttatccatccattcccctagcctctcagaaaagaattatgtttttatctctcatactctcattcttttcttataaatatcagagaactaacaagatacaaaatgagagatactttcatcatcggtatctctcattctatttcaacttatctctcatgatttttcggacagtataccgttatcttaccttcatccggctgtcctttacagatgatactacctatcttcttagcatctcttacctacatccttatcttatctcccttacatacctctgttttcttaccgacatcttcatcgttccactagaatgcacaggcctgtgcactctagtgaacagatcgtgccacccgggtgaaacgacctgttcacccgagtggcacgataacaattgaacttatatcacacgactttatcagatagataacacaagaatataaggttgttgacatgaagagtaaggctacatctcccctattatcccagtaatttatcaatgataaaatggccgataaagaataaatcgcccataaaaacaatgctgaatatcagaaaagcgaagcaggtactccagcgggaacctcctgcttcctcgccacgtttaatacgaagcagggaactatgcagacaatcgcccgcaatgaacagcacaaacagactcggaatcaagtcaccccatgatatcagccacaggttatcaccttttcccatcaggaatgtcaatgctacggccaacaggaagacagaagcatactgcaaatcttttctcttcgaattcatagcggtaatatttaaagtacttttcacaaagatatcgaatatcttccaataatccttatcaattacatctaaaaaaggttatgtctgaccggaagattcggacggagcattccctgccttagcggatttctttttcagccggccgctctttctcagcgcttctgcaataatccactgaagttgtccgtttgtactgcgaaactcatcggctgcccatttttcaatggcatccattgtctcggcatctacacgcaaaacaaaactctttattgaagattcttttttagccactaccttcttaccttctgtttttatttattaatgattcaacgtacctgtattgactaccggctgtgcagcctcatccgcacaaagaactacaagcagattactgaccatcgccgccttcttgtcctcgtccaattcaacaatttcttcttcagaaagtttatgcaaagccatacgtaccattgatacggcaccctccacaatcttttcacgggcactgataatggccgaagcctgctggcgacgcaacatgacggctgcaatctccggagcataagccagatagttgatgcgggcttccactatttccattccggccatcgccagacgttcgttaagctggtgttccaactgatcattgatttcatcgccaccgctccgcaatgtcaattcatccgaattcgcttcgttatcatcgtaagcatacaatcctgccacctgacggagagcagcatcactctgcacacgcacaaaatcttcaaaagcattcattcgtccggcaacggttacgctcatctgtccggttcctttattatccgccatcgtctgtgcatcgatttcgaacatggccttatacgtatccttcagtttccagacaagcaccagtcctatcagaatggggttaccaatcttatcattcaccttgataggttctatatccagattacgggcacgcaaagagagctttttcttattcataaaaggattcacccaaaagaaaccggtttcggtaaaggtacccttgtactttccgaagaataccatagcccgggcttcgttcggttcctgagaaaaatatccgggaatcatcagaatagctgccgcaagaaagaggatcagcagcaggaacaaaacaatacttcctttaaaaaggacaaagctcatcacaatcagaagaggcagtatcgccaaattaacaaacaaggctacaaacccattaataaccacgtcattgtactgaaattcttttgcattcataggactaaattttgatattattttgatatcacaaatatatcactttccattctgataatgcaaggggaaagactcttttttctccgcaatacatcatttttaactaaacagcagtcatccgatactaaacaaatttaaaaggcgtaagaaaataagggtttaattcaaacaaaaacaggatgtactttgaggtatttaagtttattgttatttttgcagggtatgaacttaacccccttaaacaagtaaaatataaaacgatttataaaatgagaaaagtaagtttagccctgctcctctgccttctctgcctcgccggaatggcacaaggacaaaaggcacttgatttaaaagatattacctccggacgcttccgcccggaaaatattcagggagtcatccccacaccagatggagagcactacacacaaatgaacgccgacggtacgcaaatcatcaaatactcattccgcacaggagaaaaggtagaggtgatctttgacgtgaaccaggcacgtgaatgtgacttcaagaatttcgacagctatcagttctcacccgatggtgacaaattgctgattgctaccaaaacgaccccgatataccggcattcatacacagctgtgcattatatataccctttgaaacgaaatgataagggagttacgacaaacaacattattgaacggctgtccgacggcggacctcaacaggtccccgtcttttctcccgacggaacgatgatcgctttcgtgcgtgacaataatatatttctcgtaaagctactctacggtaacagcgaaagccaggtgaccgaagatggcaagcaaaatatggttctcaacggtatccccgactgggtatatgaggaagagttcggtttcaaccgtgccctggagttcagtgccgataataccatgattgctttcatccgcttcgacgaatcggaagttccttcttattcttttccgatgttcgcgggagaagcaccgcagattactcctttgaaagactatccgggcgaatatacctacaagtatccgaaagccggatacccgaactcgaaagtagaagtacgtacgtacgacatcaaatcgcacgtgacccgcaccatgaagcttccgatagatgcagacggatatatcccccgcatccgcttcacgaaagatgccagcaaacttgccgtcatgacattgaaccgccatcaggatcgtttcgacctttattttgccgatccgcgctcaacgctctgcaagttagtgttgcgtgatgagtcaccttattatattaaggagaacgtgttcgataatatcaagttctatccggaaactttcagtttgcttagcgaacgtgacggtttcagccatctttactggtacagcatggggggaaaccttatcaagaaagtaaccaatggcaaatatgaagtgaaggattttctgggttatgacgcaacagacggctctttctattataccagcaatgaggaaagccccttgcgtaaagcagtctacaagattgataagaaaggcaaaaagacaaagttgtctcaacgtgaaggaaccaatacgccgttattcagcaaatcgatgaagtattatatgaacaaattctcgaatctggatactcctatgctggttacactgaacgacaacacaggcaaaaccttaaaaacgcttatcaccaacgaccagttgaaacaaacgttagccggctatgccatcccgcaaaaagagttctttaccttccagactacggacggggtaactttgaatggatggatgatgaagcctgtcaacttctccgcatccaagaaatatccggtgctgatgtaccaatatagcggtccgggatcacaacaagttctggatacttggggaatcagttgggagacttacatggccagcctcggctatatcgttgtatgtgtagacggtcgtggtacaggaggccgcggagaagcgttcgagaagtgcacttatctcaaaatcggcgtgaaagaagccaaagaccaggtcgaaacagctctctatttaggcaaacagccgtatgtggataaagaccgtatcggtatctggggatggagctatggcggatacatgacattgatgagtatgagcgaaggaactccggtattcaaagccggtgtagctgttgccgcacctacggactggcgtttctacgacactatatatacagaacgtttcatgcgcaccccgaaagaaaacgcagaaggatacaaagaatcatccgctttcacacgggctgacaaactgcacggcaatctgttgctggtacatggtatggcagacgataatgttcacttccagaactgtgcagaatatgccgagcatctggtgcagttgggtaaacaatttgatatgcaagtatataccaatcgtaatcatggcatatacggcggcaacacccgtcagcatctatatacacgattgaccaacttcttcctcaacaatttgtaatggctgacagagtgcgcaagcctgaatggctgaaaataaatatcggtgccaacgaccgttacaccgaaactaaaagaattgtcgactcccactgcctgcatacgatatgcagcagtgggcgttgtcccaacatgggagaatgctggggaaaaggaactgccacatttatgatcggcggtgacatctgtacccgcagctgcaaattctgcaacacacaaaccggacgcccgcatccactggatgccaacgaaccgacacacgtagcggagtctatcgctcttatgaaactagatcatgcggtagttacctcggtagaccgtgacgaccttcccgatctgggagccggacattgggcacataccattcgtgagatcaaacgactgaatccgcagaccacaatcgaagtactgatacccgattttcagggtagaatggaactggtagacctagtgatagaagccaatcccgacatcatttcccataatatggagacggtaagacgcatcagtcccctggttcgcagtgcggccaactatgataccagcctgcaagtgatcggtcacatcgcccgaagcggaacaaaatcaaaaagcggtattatggtggggttgggagaaactccacaggaagtggaaaccattatggacgacctgctggcagtcggctgccagattcttacgataggacaatatttgcagcctacgcaccgtcattatccggttgccgagtatgtgacgccacagcaattcgccacatacaaaaccatcggtttggagaaaggattcagcattgtagagagtgctcctctcgttcgttcgtcttatcatgcagagaaacacattcgatagaaaacaaaacacattccctatttgttttataggtaaaaccggcaaataaacataaagatggatcataaaggaacactttcttccgcgtttaacatgtcattgggttttatccccgttattatttccattttattgtgtgaatttataacgcaagacacggctatttacatcggtactggtataggtatcgtagggatatacctattactacaccgtaaaggtgcgctaattcctaattttattctttatattgccaccggaatgctggcactgctgtcacttgcagccttgattcccggtgactatgttccgccaggtgctctgcctcttaccctggaagtcagtatcctcattccgatgctgatactctatatgcataaaaagagatttatcaaccactttctgagacagataggctcctgcaataagcgcttgtatgcgcaaggagcagaggcggcagttgtttcggcccgttttgcattgatcttcggtatcctgcattttattattatcagtattgtcgttgcctgtcaggaccctttaagccagacaagcatggtgatactttataaggtatttccccctgtcgtatttgtgatgagtaccctgttcaatcagattgctatccggtatttcaaccatctgatgtcgcacacggaatacgtgcccatagtcaatacgaaaggagatgtcatcggaagaagtcttgccatagaagcactcaactataagaatgcctatatcaatccggtcataagaatagccgtatctactcacgggatgctgtttctttgtgacagaccgatgaatgccatccttgataaagggaaaactgacataccgatggaatgctatctccgttatggtgagtccctcaccgaaggagtaaaccgcctggtgaacaatgcgcttccacacgcaacggaagacttcaagccggagtttaacattgtctatcacttcgagaatgaaacaaccaaccggctcatctatcttttcatcgtcgatatcaaagatgattctatcctttgcactccccgtttcaagaacagcaagctatggagtttcaaacagatagaagaaaatatgggcaaaggctttttcagcagttgcttcgaagatgaatacgaacacctgaaagatgttatttgtataagagaaaaatacagggaatcttagacaattcgggaatatgccctttccagtctttcaccgtgcgggtttgtataaactcgccttcgcaagttatattggcagcaatacatagttttgtctgcggacggcaattctgcaagatatcttctatcatcttatgattccggtaaggagtttcgatgaatagctgtgtctgactttcagcatagacacgctgctccagtgttttcagtttcttagcccgttctcccggttctatcggcagatagccatgaaaggcaaagctctgtccattgaatcccgaagccatcacagaaagaataatagaggaaggtcctaccagaggaatcactttcagtttctggcgctgggcaatggcaaccacatctgctcccggatcggcaacggcaggacagcccgcctccgaaatcacccccattgaggctccacccgccaaaggtttcagataaccggatatatcttcgggagaagtatgcttattcaaaggataaaaagtcagtgaatcaatatctatttcccggtcaaccttcttcagaaagcgacgggcagaacgaacatcttcgacaataaaatgccggataccacgaatgatctccgtattataagaaggtaacacctgttcaagaggtgtatcgcccaatgtaacgggcaacaggtaaagagcagtttccactttaggtaataggtgataataataggtaataagtaataggtatgggctagagtttcaggtagccggactcttcgaacatactctgataatcggtaagctctaacagatcctttattttaagatctttatgctttttcatgtaggatgcgataatccgtgctcccacccacgaaccgatcaatgcaggggcttgtcctcccagcatatcaacagtcggcgccggtttcatatagtagcggatcaccattgggtcacgtgcgtgcagatgatcgtttgcacagatatactcccagatatccttctcattcttcctgcaccattcgttctcctgatccgagtatcccattgcctggccaatatcgtcataaccaagcagatgctgcaccacataattgattttgccggaatgcatcatcagatcgaccagacaagtaccttcatgatagtccagtccgtaacggctgagaagatagaatgcgaaacaatccggcacaatccgttccggacgcatcgaggtacattgatagtcatagtagaaacgtttgtagagaggatagtcttctcccatatacttatcgaggctgattcccagcaatgtatctaccagaatgatcgattcattgaatgcggatatctgcgaataaataaatggtattttcgtatcggggacttccttcttcagcttccggaatcctttggtgagccctttttctacttcgtcaagattgggatatttagcttcgacatcgctcagcaagcgaagcaaggtgctatccgagtagaatttttgcaaacgttgagaaatggtatcgtcctttaccgtaccgatagacagtacatcttctatcagaatctttgtcggctggcgatagtccattgtcagtttctgcatagcggaaaagctgttggagcgaacatattcgctcaacagcttatcgtatctcagaacagaaatcccttcttccttctgctccgcaactgttcctgtgcttaagccgcaggaggcgaaaagcatacctattaatatagtaagaagagagatccgtagtttcataaccttttatccgtaaatgatattaccattttcgtccatgtactcatccagtcctttttcgtaagtagccattgcacgaagactcatacctacgctggagaaaccaccgtcatggaacaagttctgcatggtcaccttacgggtaaggtcggagaacatcacgatacaataatccgcacattcgtcagctgttgcatttccaagcggagacatacggttagcgaaatcatacagcttatccatacctttcactcccgaaccggcagtagtaaaggtaggcgactgtgaaatcgtattcacacgtacgctatgctcacgaccgtagatgtacccgaaactgcgtgcgatagattccagcagggctttagcatccgccatatcattgtagccgtagaaagtacgctgagcagcgacataactcaaagctacgatagaaccatattctgcaatagcgttcagtttcttggcagactggatcattttatggaacgatacagccgaaatatccaatgtcttgtccaacattccatagtcaaggtcatcataagtacgtttcttgcgcacgttaggagacataccgatagagtgcaatacaaagtcaatttgtccgcccagtatatccatagatgtcttgaatacattcgtcagatcttccacactagtggcatctgccggcactacctgacagtttagtttttcagctaatgcattgacttcacccatacggatagccatcggagtatttgataatgtaatagttgcaccttcttctacggcacgctctgctactttccaggcgatagactggtcgttcaaggcaccgaagattattcctctttttcctttcaacaagttgttactcatatcttctaatagttaaattttgtgcaaagatagtatctttctgcataaaaacacgagaagtgtgcaaatattagacataaatgacaaaaaatacacgtattctatcaataactccacatctgcctgaagtttcccccttatctttgccaatgataattaagaggttttttcataatatttattttaaggttagaattaggttaacatgaatttgtcttattcctttccggcaggctgcctgcgagaggtcgcctgcggagggagataagagttatgagaagccatcttagaaatcgaaagagaataccagaaaaacaataaatgtataaccctatagaaaagttactaaatgaacacaatgacaagaagactcctctggatggtcgtatgttgtttgccgtttgtctcgggatgcaaacaaagtgagtgcgcaataagcgaaaacgcaatagatgacaccatttaccagaatttacctttcgaaatgccgaaagtacagcagccggtttttcctgcctatgaggtaaatatctctaaattcggagccaagggggatgggatgaccctgaatacgaaagcaatcaacgatgctataaaagaagtaaaccaacgtggcggaggtaaagttatcatcccagaaggcacttggctgaccggacctatcgaactgctcagcaacgtgaatctttatacagaacgcaatgccctgatactcttcaccggtgattttgaagcatatcctatcatccccacttctttcgaaggattggaaacacgccgctgtcaatcaccgatttctgctcgtaatgcagagaatatcgctatcacaggatatggaatatttgacggaaacggagactgctggcgtccggtgaagaaggaaaaactaacagcttcgcaatggaataaactggtaaaatcgggtggtgtactcgatgaacaggaaagaatatggtatcctaccgccggttcgctgaaaggtgcaatggcctgcaaagacttcaatgtgcccgaaggcatcaacacggacgaagaatggaatgaaatccgtgcatggttgcgccccgtattactgaatttcgtgaaaagcaagaggattttgctggaaggagtcactttcaagaactcaccgagctggtgtctgcatccgttgtcatgtgaagactttacagtgaataatattcaggtaatcaatccctggtattcacagaacggagatgcactcgatctggaatcttgcaagaatgcactgatcctgaatagtgtattcgatgcgggtgacgatgccatctgtatcaaatcgggcaaagatgagaacggccgccgccgcggagaaccttgccagaatgtaatcgtaaagaataatacggtattacatgggcatggcggatttgtagtaggcagtgaaatgtccggtggtgtgaagaatatctatgtagaagattgtacattcctgggaacagatgtaggtctgcgcttcaaaagtacccgcggacgtggcggtgttgtagaaaacatctatatcaataacatcaatatgatcaatataccgaacgaaccgttacttttcgacctgttctatggtggcaaaggagccggagaagaatcggaagaagatctgctgagccgtatgaagacggcgattcctcctgtaaccgaagagactcctgcgttccgtgatattcatatatcaaatgtcatttgcagaggttcgggacgtgcgatgttcttcaacggacttccggaaatgcctatccgtaacgtaactgtgaagaatgttgtgatgacggaagctactgacggagtcgttatcagtcaggtagacggtgtcacactcgaaaatatttatgtagaatcaaccaaaggaaagaatatactgaatgtcaaaagcgccaagaatctgaaagtcgatggagagacttatgaagagattgacgccaaaggacagatattgaatttcaaataagagattccaccacagaaaaccacaaaatcattatatagagtaaaaagctcaaatagcagactaatttatcttccaaagataagccggtctgctattttttcaattacttttgcagaaagaaatacgacgtataatatcatgccttaaaatcatgaagaagaatatttttatcatcacactccttgtcgggtgctgctctctgtccgcctgggctcaaaaacaggagaaaaccattactgtagaagtaaacaataactggaaccgtgccaagacggatgaaccggtagtaatcaacttgcgtgacttgcataccggatttaaagtaaagtctgccgtagtaatggaaggaagcactgaaattccttctcagctggacgacctgaacagagaccgtaagatggatgaactggcattcgttaccagcctccctgctcacggaagaaaaacatttcaggtaaccctgtcttctgaaaagagtacgaaaacctatccggcacgggtttatgcggaaatgttcattgctgacccgagaaaaggaaagcatcagtcagtacaggcaatcactgtccctggtacaagtaatatatatagtatggtccgtcctcatggtcctgtactggaatcggaactggtaggctatcgtctttactttaacgaaaaacagacaccggatatctacggtaagttcaataaaggactggaaatcaaagaatctcagttctaccctactgacgaacagttagcaagaggattcggtgacgatgtcctccgggtattcgacagttgcggtccgggtgctttcaaaggatgggacggaaagaaagcaactcatatcactccggtggctacccgtacggaacgtatcatctcttacggtccggtgcgtgtcatcgcagaaatcgaagtgacaggctggaaatatcaaaatgcggaattggacatgatgacccgttacacactctatgccggacaccgtgatcttcgtatcgaggcattcttcgacgagcctattaagaacgaagtgttctgtacaggcgttcaggatattgtcggtaccgcagaatcttactcggatcacaaagggcttgtcggcagttggggaacagactggccggtaaacgataccgtgaaatatgccaaagaaacagtaggtcttgggacctgcattccccaacgatatgtgaaatcggaagagaaagacaaagacaactacctctacaccatcacatctccgggaagcaaatacttacagtatcacaccactttcacttccatgaaagaaactttcggctataagacaccggaagcatggttcgcttatctccgcgaatggaaagaagaattggcacatccggtaacggtcaaaataaaagatattcattaaacaaagcatacaaatacagttaaacaatcaaatactggagtatttaccagtttttataccgactctgcacaattattactcctttgtgcggagtcttttttttacctttgccccattgagagacttcaactgaatctttaatatcaaactattatacctatatcatgaaacgattgacacagactttagctttttgcctgctaactgttttcactgcggtagcacagaaaaactatgtatccgaagtatgggtttccgatctcggaaatggtaaatacaagaatccggtgctctatgccgattattccgatccggacgcttgccgcgtaggagatgatttctatatgacttcttccagcttcaactgtctgccgggattgcagattctacattccaaggatttagtgaactggacgattatcggagctgctgttccctatgccctcacccctattgaaacaccggaacgtccggaacacggcaaccgtgtctgggcacccagtatccgccaccataacggagagttttatatcttctggggagacccggatcaaggcgctttcatggtaaaagccaaagacccgcaaggtccgtggacggaacctgttctggttaaaccgggaaaaggaatcatcgatacctgcccgctttgggatgaagacggaaaagtatatctggtacacgcctatgcaggaagccgcgccggactgaaaagtgtaatcaccatctgtgaattgaataaggaagcgaccaaagccatcaccccctcacgcattatcttcgacggtcacgaagcacaccagacgtgtgaaggcccgaagttttataaaaggaacggctattattatatcttccatccggcaggcggtgtgccaaccggttggcaggtagtactccgttctaaaaatgtgtatggtccttatgaatggagaactgtactggcgcagggtgattctcccgtcaatggacctcaccagggagcttgggtagacactccttccggagaagactggttcttccactttcaggatgtaggcgcttatggtcgccttgttcacttgcaaccgatgaagtgggtgaatgactggcctgtaatcggtatcgacaaagatggtgacggttgcggcgaaccggtaatgacctacaaaaagccgaatgtaggaaagatatatcccatctgtacaccgcaagaaagcgacgaattcgacggatatatactctctccgcaatggcagtggcacgctaatatcaatgagaaatgggcatattatgccggagacaaaagttatgtcagactatactcttatccggtagtagcggattataagaatttgtgggatgtagctaatctgttgttgcaaaaaactccttcggacaatttcaccgccacaatgaaactgaccttcatgcctaatccaaaactgaaaggtgaacgtacaggtttggtagtaatgggcagggattatgcaggattgattctggaaaatacggacaaaggtcttgtgctgtctcaaattgaatgtaaaaaagcagataaaggagaagcggaacaggtaaactcttctgtcggtcttacccaaaacacggtatacctaaaggtacgtttcagttgcgacggcaagaaaattaaagccagtgaaggaggtaacgacctcattgtgatgtgcaacttcagttatagccttgacggaaagaagttcttgccattaggcaacccttttcaggcaagggagggacaatggattggcgccaaagtcggcatgttctgtacccgtccggctattgttaccaatgatggaggatggacagatgtagactggttccgaattacaaggaaatgattcgttttttattcctatctttgtaagcagaaagaaaggaaaacaggattaacataaaaaaacaagaagttcaatgaagaaactagtcattttcgatttggatggtacattactgaataccattgccgaccttgcacacagtacaaattatgccttgaataagttaggatatcccacacatgagatcgagaaatataacttcatggtaggaaacggcatcgacaaactttttgagcgtgccttgccggaaggagaaaagtccaaagagaatgtactgcgcgtacgcaaggaattcgtcccttactatgacattcataatgccgatgacagccgcccttatcccggtattccggaattgctctcatacttacaggatgcaggtattcaaattgctgtggcttccaacaaatatcaggcagccacccaaaagttgattgaccattattttccggaaatccattttaccgctgtgttcgggcaacgtgaagggataaaggttaaacccgatccaaccgttgtattcgatattctggaagttgccaaagtaaccaaagaagaagtgctgtacgtgggtgattccggcgtggatatgcaaacggctgccaatgcaagagtgacagtttgtggagtaacatggggattccgcccacgtgccgaactggaagaattcagtcctcaatatattgtagataccgctgaggagatcaaacgtcttattctctaatatctgaatctacagaaagatctcattcttcaagctgtacgatagatctatgcggattatatcaacatagatctatcatgcagctatttttcttcaataacagaacaatattttaaagattctgcgcagagaattgaaaaccgattcccgcatcatataatttactatttctttttaacttcagaaaatcaatatccggcagacttccatccgctttgcgaggcaatgttaactgagcaggatccaaacttacaaaatcatcctcacctacggtcatatctacaggaagaaaagaattattgataatcgtacattcctcccgattcacatcgacaatatgttttcctgcagccctcggcttatatgacaaattattccgaataatatgatcatatccgtccacgtccactatttctccggcagacttacgattcagcatacagaaattagacggattctgataaccggtattattgaaccaggaaattcctcccaaatggtgattggcataaaatcctttgttcttgtttttatatgccagacaattcttcactacatggtgtggaatctcattcggcatcttcacttttgagcgcataccatagccacccgctttaaaccctgtaccatctcccgcacccacaaatcctccgggcttatatccattataaaacgcccagcaatcttcaatcgtataagctgcttgtgcctttatcaaatcaaaaccgtcatcactgttgtaccaggcccgacatcctttaaacacatttcccgtataggaggcagaagccggatgcccaccgaagccatccacatttccaccggtaccattctcagatacagggtcataattattataagcatcacagttcagtacgagattatgacttccccgcaccaaataaaaaccaatagccatgccatcgtgcatcgccagattctcgtaaatattatgatttccaccttgattgtatatacactccgactgagtatgctcccggatagtaacctgtgttttgataatctcaaaattgcggaaatggaggtaagagcctgatacataaaagacagatacccgtttaccctccggctttacttcagccagattgaatatcggacgttcatcctgataacctgtatagcagattctcttggcctgagtgccacttttattcatttcaaaaacataagcgcgcaaatgatctcctcccatcatctgctcttcccgtatccgatactcgcctccgcgaatatataccgtatctccgggagcgacttttgactgcgctttttgtaaagtagcgaaaggtttgtcaagcgtgcccgcatttgaatcatcaccattggtagctacaaaataattcgtagccgaaagagacaggaaacaccccataaaaaaaagactaatacctatatgctttttcattatgcttatatttaaaaacctattgaaaactgatttccattttactgttgttaatgtgcttctttattacctgactcttatcttctacctctaaacaaatattctgtaaccggaagttttttccagttaccgttttcatgccgctaaattacagctttctttatagtttagaatgtacatgcgtacacaaagcctagaaaatcgtatttcacctgagatttacatcaagaatgaacgataatacatcgtttctttgtttttccgtacgctattacatcctctattctaaaaagaaaattaactttgtaaccattaataataatgtagaatcgtagaaatcaaatatgaaaaatgcactgctgatattcgcattcttatctttctatctcagttcagtacatgcatctgtcgagatacgttcgaacaaactgaccaccggtgacggactggcgaataattccatccgatatatgtttcaggacagcaagggatttatgtggatgggaaccgtcaacggattaagctattatgacggcaactcttttgtcagtatctacccggaccctaatctgccgatttcattggccgacccacgcatccggaatatggaagaagattctaacggttttttatggatcgccaccctctcttctttatatagctgttacgatttaaaacatgggcgcttcgtcgatttcaccggttgcggagaatacaaacagagctattcgaaaaaaatcattgcatccgaccagtctatctggttgtgggataacaataacggatgccgtcgtgtcgtctatcaggatggccagttctcatcgcaggcatacaaaaaagaattaggcaacctatcttctgacgaggtactgtttgtctacgaaagtaatgacagccccggacatgtatggataggaaccaagcaaggattatggaaataccatgacggcaaactggaagcaatggatacacagggagaaagctgggaacatatcttttcttatgaccaatatacctgcatcattaccgggaaaaaagaaatctaccgccactctctttccaataaccgactggagaaaatcgcttcattaaccgaactcggagatacaggtgtaatcaccggaagcctccgcctgcaacatcaatgggtgatgtttaccgccactggcagttacatcctagatcccgttacgggaaagctgcgccggttctcccgcctgaatattaaaaacggtaacgtcaccagagacaataaagggaatgcatgggtacacaactataccggcaacgtatggtatgtcaataccagcactggcgacatcaaacattttcagtttctttcatccgagcatttgggatatatcgatgtagaacgttactctatcattcatgattcacgggatatcatctggattacgacttacggaaacggactctttgcctacgatctgaataccggcgatctgcagcacttcacttttgaagtcagtcactccagccatatcaattccaattatctgcaatatatcattgaagaccgttccgggggtatctgggtgagttccgaattctccggattatctcatctggagattctgaataaaggaacgttacgtatctatccgaatggcgaagatgcttctgaccgctccaacacgatacgtatgcttttacgtggcaaaaacggtaatgtatatatggcaaaccgcatgggtaccctatatgaatatgatgccgacctgaaaaatatacttcgtagagagaagtttacacataacgtatacagtatgtgcgaagataatgaaggacagttatggttgggtatgcgtggtataggattacgtatcgggactgaccaatggtaccgatataacagcaaggataataactccttatcaaacgacaatgtctacttaatctaccgtgaccgcaaaggacggatgtggataggaacatttggcggaggattgaatctggctgtcaaaacaggcaacagttatcaattcaagcatttctttcaaggcagttatggagaaaaacgagtacgcgtcatacaggaagaccgcaacggcatgatgtgggtgggtaccaacaacggtatttatatcttccatccggactcactgatcaactcccccaagaattacgtactttacaatcatgtcaatgaaacattccccagcaatgaaatccgctgtctggtgaatgatcatgaaggaaatatgtggattggaacaacgggagcaggctttgccatctgctatccgggaaatgactaccaacatctgactttcgactgttatagtattaaagacggattgcccaacggagtcatacagtcgattgttgaagatcaggacaataaaatgtggattgcgaccgaatatggcatttcccgcttcaccctcgccaccaagcaaatagagaattattatttttcttcacatacactggggaatgtatactctgaaaatacggcttgcataaatgctgacggaagattacttttcggtacgaactacggcctggtagttctcgatgccaataaagtggaaaacatggaaaaacttgcatcgaccgtattcacagggcttcacatcaatggagcgcatatgttgcccggtatggatgattcccctctcaacgaaaccatgtcctatacagggcagttaaacttgaaacattatcaaaattcatttgtcattgccttttcaacattcaactttttaagcggagcatccaaatattcttatcggatgcctccatatgattcggaatggagcatcccttcagcacaaaatttggcaacgtaccgtaatcttcctcccggtaaataccagttgcaagtgaaagcctgcaatgtagccggcgtatggggggaagaaagcactatggagattgtcatagctcctcctttctggcagacgacctgggcctatctgatttatctggtattcattggaatcgtctgttatttcagtttccatatcatacgaaatttcaacagattacgcaatcgcatcgctgttgagaagcaattgaccgaatataagctggaattcttcaccaatatatcccacgaattccgtacaccgcttactctgattcaaggtgctctcaacaagctaatcaatatagagaatcctcccaaagagatgcaacgtcctttaaaaaccatggataaaagcactcagagaatgttacgcctcatcaatcagctacttgaattcagaaagatgcagaaaaacaaactggccttatctttggaagagacggacgtcattgctttcctttatgaaatcttcctgagtttcaaggatacaagcgagtccaaaaacatcgatttcagttttgagccgtcacaacctgcttataaaatgtttattgataaaggctatttagacaaggttacctacaacctcctatccaatgctttcaagtatactccttctaacggaaagattatattcaaaatagatattcaggaagacaagcaacagcttcgtatacaagtcatagataacgggatcggcatacccaaagaaaaacgttctgaactgttcaagcgtttcatgcaaagcagcttctctcatagcagtgtcggagtaggtctccacttgacacacgaactggtacaggtacataaaggtaatatcagttatgatgaaaatgagggaggcggttctgtctttaccgtcctattgccgactaattctgatatctatcaggagaaagatttcctgattcccaatcagttattaaccgaagaagaggaacagcactccaaagattttctcagaaataaaacgtcagaggatactttccagcctcctgtcgatcctttgaacaaacgcaaagttttgattatagaagatgatactgatatccgtgaattcctaagagaagaaataggagtttactttgaagttgaagtagctgctgacggaacatccggttttgaaaaagcaagtacgtatgatgctgatttaattgtttgtgacgttctgatgccgggaatgaatggatttgaagtgacacgcaaacttaaaaatgaatttaccaccagccatatccccatcatattactgactgccctcaatatagaagagaaatatcaggaaggaattgaatccggagctgatgcgtatatcacgaagccattcaatgtctctttactactggcaagaatcttcaagttaatcgagctacgggataaactgcgccaaaaatattctaacgaaccgggattggctcattccattatctgtaccaatgacaaggatcagaagttctcggtaaagctgaatgaagtattgaatgagcacatgaccgataccgatttttcggtcaatgactttgccggaataatgggactaggacgtactgtattctataaaaaagtacggggagtgaccggttattctccttacgaatatttacgtgtcatgcggatgaaaaaggctgctgaaatgttattgacagaagatctcaccatagccgaagtcgcctatagcgtaggtatcaacgatccgttctacttcagtaaatgtttcaagaaccaattcggggtatctccatctgcctatcggaaaaagctgtctgaagatgaaaatgaacccataaatgatgccgacgtatgatcttacaggttttccgtactaatttaaggggtgtttctttcattgatgtactttctttgccaatgaaaaattaatcattaagaaatcatgagaaacaaactctttctatttgtatttctgtttgcagtgctggctattgttgatagtcacgctttcgaacgcaaaaaatacaatttcaacagtgaatggcgtctgcaaatcggagactttcccgaagctaaacaatctcaattcgacgatagccggtggaaagcggtcactttaccgcatgcctttaatgaagatgaagccttcaaagtgtccatcgaacagctgacggacacagtggtatggtatcggaaacactttcggattccggcttccggtaaaaaacaaaaagtattcatcgaatttgaaggagtgcgccaagccggtgacttctatttgaacggacaatatctgggaaagcacgaaaacggagtaatggcggcaggcttcgacctgacaccttatattaaagaaggtgacaatgtactggcagtacgtacggacaatgactggatgtattgcgaaaaaagtactaactccaagttccagtggaacgaccgtaacttcaacgcaaactacggtggtctgcccaagaatgtattcttgtacgttacagatgaagtgtatcagactcttcctttatacagtaatctgaaaactaccggagtttatatttatgctaaagacatcgacgtaaaaggacgcactgccaccatccatgcagaatcggaagtaaaaaacgacagtcgtgaaccacgccaatttagctaccaggtggtcttgctggatgctgacggcaaacaggtgaaaagcttcgaaggtgagaaagtaaccttacaaggtggcgaaacaagggtagtgaaagctgcttccaaagtaaataatctccatttctggagttggggatatgggtatctttatactgtccagacgattctaaaagacaataagaatcaagtctttgatgaagtaagtactcgtacaggttttcgcaagacacgatttgcagaaggcaaaatatggttgaatgatcgtgtgatccagatgaaaggatatgcacagcgcaccagtaatgaatggccggcggtaggcctgtccgttccggcatggcttagtgactactccaatggcctggtagtaaaaggcaatggtaatctggtacgctggatgcatgttaccccatggaaacaagacgtggaatcctgcgaccgcgtaggtctgattcaggcaatgccggcaggagactccgaaaaggaccgtacaggacgccaatgggaccaacgcacagaactgatgcgcgatgcaatcatctacaaccgtaataatccaagtatcttattttatgaatgtggaaacaaaggtatcagcagagagcacatgatagaaatgaaagctatccgcgaccaatacgatcctttcggcggacgtgctattggttctcgtgaaatgctggacattcgtgaagctgaatatggcggagaaatgctttatatcaacaagagcgtgcatcacccgatgtgggctacagaatattgtcgtgacgaaggtttgagaaaatattgggatgaatacagctatcctttccacaaagaaggagacggaccgttacatcgtaaccaacctgcaacagactacaatcacaatcaggacatgctggcgatagcaatgatccgctgttggtatgattattggcgtgagcgtccagggacaggtcgcagagtcagttccggaggggccaaaatcattttctcggataccaacacacaccaccgtggtgaagaaaactatcgcagaagtggagtaacggaccctatgcgcatcgaaaaagatgctttctttgcacatcaggtcatgtggaacggatgggtagatacagaagaagacaatacctatatcatcggtcattggaactatcccgcaaatacagtaaaaccggtctatgtcgtttctacaggtgaagaagtagaactgttcctgaacggtcagtcactaggaaaaggcaaacgcgaatacaatttcctgttcacttttgacaatgtggcttttaaagccggtaaactggaagctgtcagctacaacaaggccggtaaggaaataagccgctacgcagtaagcacggttggtgaacctgccggactgaaactgacaacgatacaaaatccggaaggattccatgcggacggagctgacctggcattaatacaggtagaagtggtagataaggatgggaaacgctgtccgcttgacaaccgtaccattcaattcgacctgaaagggaatgccgaatggcgcggaggcatcgcacaaggaaaagacaattatattcttaataccagtctccctgtggaatgtggtattaaccgtgctcttatccgcagcactacccaagccggcaagatcactctgaccgctaaagcagaagggctccccagcgctacaattacattagaaacccttcccgtcaaagttagcaacggattgagtacttatttgcctcagatgactctgaaaggaaatctggataaaggaaagactccccttaccccatcttacaaagacacaaaacgtgatatacgtattgtatccgccaaagccggagccaacaatgagactgtaaaccaaagcttcgacgataatgaaagaagcgaatggatgaatgacggcaagctcagcaccgcatggattacatatacgctcgaaaaagaagctgcaatagatgatatctgtatcaaattgaatggatggcgttcacgcagttatcctttggaagtgtttgccggcaatactatgatctggagtggagatacgaataaaagcctggggtatgttcatcttaatgtggaaaagccggtacgttccaaacaaattaccatccgtctgaaaggtaataccagcgatcaggatgctttcggacagatcactgaagttgcggcaaaagcagcaaatgatatggaactcgaagcaaaagcgaacaagaataatgctaatctgagaattattgaaatagagtttctggaagcaatcaaatagaataaaacattttctcccaccataaaggagatatgtaaaagaaggtgtcacaaaaaccatattgccccataggaacaaaagattagtacggagaaacaaccgtcaatgaaccgttcagtaagctattatgcaggctagattaatgtatccggtcagtaacaatagattgtttcatgtacgtggtcccatcagtctacgtacatgagccattgggtttacgtacgtgagccgaacggttcatgaacatggaacgaagacataaaaccgacttaacagattaatcaaaccttgcttgcatattaaggttaccgggctttgttcttaatgtaagcagcataccttggaaacattaaggtgtaaacagcgtacattgacgcccaaaatgatgtttttaacacatgcaggcaaaaccctcaagctgactatctatcatctgataatcaagactttaaataaaagattcatcaaggagaggtgacaataagaatgaaagatacattctattgtcaccttattatcaccctctattgtcacccctatcttctttattataaaacacttaaatcagaaaagtgacaagtgacaataacaatggataaatatttcctatgtatatgtttaaacagaaatgagtgtagtctgaaacgaccagctatttctttattagtttcttaacttctttagcatagcgtttgcctaaagtaatctggcttgctgcatcaaaatgaggatccgtttcatccttcaacggagtaagtccttcggaagacacacaagcactatggggcaaaaaagtggagatctcttttatcatgtcattaaagggttttgtaccttcgggaatataaggtttctttgtccagttccattgtgctatttgtcctacgacaactggtaaatcaggcattcccaggtcattacgtaagtctgtcatcagctgaataatcttctctttatatgcttccggatgatgacaatcggcttctccctgatgccagataattgctttcaatgtaccatacttcattgcttcttttgcacgtcgtattgcttcatcataatatccgccggactgtttggcattcttaacccatgaacgaatcgaagatcctccccgtgcattgacgattaagcctaccggatgttttttagtagccatcgtcttggcaaatccatatgcaggtcctacttgttgccagctaagtccttttcctatcgtagaatagcggttcaagggattcactgcgggttcgaactgatcatctgcattcagcaggtatacattttgtagagtatccatcacttccggtgataatttccctctccctgccatattcgactgtccaatgcaaagatacagatccagagtcttcagcggtttctcagcgtgtgcttccgatcttccccatactagcacacataaaaggaagaggccacatagataatttgttttcattattttattgattttattatcaggttaaactttattcgtacacactcctaattggtttgactgaccagctgttattataacatgtgcaggcttctgccctctcgcctgaatatgacaaaagcctaatacaaaaaacaagataaaaaagagtgttctcatgatcaatgatcctttaattttatagtaatattctcctgcaaaaataagggtacttttactattcgaccatagactattgtacacaaatacaaggtcgatcattcatatcgggcactacagagaagatttaaactaccatttagaaagcttggttactcaggcttctgccgtctcattttctccctgttctttcatttcaccgcgttgatatacggacggcgctaccccaaactgagtcttaaagcacttactaaaatagaacggatcgctgatgccaaccttgtaagcaacttccgcaacagtcagattctcaccagacaataacaactcagccgcttttttcattcgtacaacccgcaaatattcattgggagaataccccgtcactccgcgcagttttctataaaataccgttcgtcctaatttcatcaattgagcaaactcatcaatagagaattccggacgagaaagattctgttccagtacaacagccaatcggtcggcaaattccttatcacggtcagtagagcatacggcagcacgaacaattcccggctcactggagaatttctcccgcaacttatcacgctgttctatcaagcggaatacgcgtgccaacagaagttttatactgaacggcttcgcaatataggcatcagcaccggcttcaattccttccagatgttttttcggagaattcaatgctgtcagcaagataatcgggatatgacttgtcgcaaaatcagatttcaatttctttgtcacttcaaatccggtcattccgggcatcagtacgtcacaaataatcaaatcagcatcataggtacgagccttctcaaatccggaagttccgtcagcagctacttcaacttcaaaataaactcctacttcttctttcaaaaattcacggatatcattatcatcttctataatcaatactttacgcttattcaaaggttctgctattttctccggttccggtagttcttccgaaagttccagtaaatgatgtgcctgcccacctgcctctttcaacaagacattaccgggaataaggaaatctttctccgaataaacacttttgtccgtcgggatacaaacggtaaagacagaacctccgccgtcattgtctttatattcaatcgtacctttatgcacctgtaccaattcataactcagatgcaaaccaactccgatactatcaccggaaaaactactctgcataaatctcttgaacaactcattttgcttctcttttggaataccaacacctgtatcagctacttgaatctgcaatgtcttcttcacttcatctaccgtaacagaaagtataatcgtaccgttcgaaggggtatatttaaaagcgttagacaacaggttataagtcactttatccagattacccttatcaagaaacatcttgtaagacggtatagacggaataaaacggaaattcatattcttttgctccgctacatcaccgaaactcaggaagatttcataaaggaaagcaatcacatccgtttcttccaaagagagcgccaacttattattctgcatcttgcggaactccaataactgattgatcagcctcaacattcgctgagtacttttatccatcgttttgagcgggtgtatcagatcacggggaatatcagcaacccgttgaatcttttccaacgctccttgaatcaaagttaacggagtacgaaattcatgggaaatattagtaaagaaaaccagcttatattctgtcaactgtttttccacattaatacgattacgcagactgttaaagttacgcacaatacggaaagtaaaatataaagttacaatcagcaacagcacatatcccaacatagcccagttcgtcttccagaaaggaggcacaatgacaatcttcaaggttgtttcactttcattccaaacacctgctccattacatgacttcacatgaagtacatatgtacctgggttcaaatatttaaaagaagcaaaattcaacggagaaggtgtgctccatcccttatcaaagttttccagccagtacatatactttgtacgtccgctgtccgaatagtcaaaagtagagaaatctatcaagaatgaattctgaaaatacttcaaagtaatttcatccgaataagcaagcgattgtttcaatggagaatcctccatagtaggatttatctgggtaccattcacatgcaaatctgtaaagaccaccggagaaaaagtttcgctatcctgaattttatcaggatcaatgacaagcagaccgtaatttgtaccgaaaagcaattttccgtctactcccacacaagcactattctcactataaacattacccaaagtataggaagaaaagaaataattttcaaaagaatgattagtcgggttaaacttagaaataccatattccgtagctacccataagtttccgttattgtcccccaaaattgattgaatcacatcattaaccaatccttcagaggttccgtaatgttcatatttcaatgaacggtaattatcttccggctcacaaagattcaagccggagccagatgtccccacccacatacgtcctttcgtatcacggtagatacatctgatttcattgctgcaaaatgtaccgtttgtataattgaacagatgataatcgtcactgtcagctatcaatgaatccggatgaaagatgcacacaccctcactggtgcccacccagatcattccattatcgtcttcttctattactcgcaccatacgcagaccaaacttctgctgtaaaaaatgacggaatttatacttgccatcagtcgtcggttctgccagttcaagcccaccgccaaaggtacctatccacatacggtctttccggtcacgaaaaagagaaaagacattattttctgataacgaagccggatccgagacttcattgcgataccatgaatctccgatcttcaatccatttccacgggttcccacccacatttcgccttgattatcttctgctatcgcataaatattggaatggaaatactgattggacattttggaatgaagattcgagtcaaacgtatataatccgcctttacgtgttccgacccaaatatccccatccggcattttagtcaacatacgaatcgtattcgagcggtcaaataattcacgggattcgggataaatacgcgaggttccttcattcagaactgaaatacgggataaaccggaatactctgaacttacccaaatacctccggcacgatcctccatcacatataacagaaaatccgaacttatatgactctgatcatttatattagccagaaaatgttctaacttatcctctgtcgtgtcataggcaaacaatccgttaccataagtagaaatccaaatgattccccgggaatcatggacaatatgataacgttcataatcaatgtatcccagtttatcttcaggtatcaactgaaattcttttcttgctccattcttggccaaaatataagtgacacatcccgtatgattatatatccagaagtcaccatgattatcacaaatcacttcaccatttctgatgttcagaccagagtccacactgatcttgcgtgtattgaaatcatagttaaaaaccccggtattggtaaggatgacccatttatcgttcaacaggaagtttcccgtaggtgacgtcttacccgcaacagcagaaagcgaaccgacttttgtcagtttttgctttgtagtctgatagcagtagatgtctccgtccgctgtcagaaaatacatatcattcttgaatgccagagaagaagtaaaatggagtaatctgtcttctaccttatactgtccgtcggatacggaaactaagccacgctgtgtcccgatccagattcgtccgccggcatcttcatttacaaactgtacccggttatccggaagatttccacgctccgtcttaaattccgtagacaccatctgtctgtctttctgatggaccattctgagacaaccattgccggaatgtctgagccatacatccccattagcagcaacaaatatagacgaataattcttttccagcgcaccagtccccgtatagtctacaaaacaggcacgttgcaagtcataacaactgaacaattccggagttgtagagatccataaaaaaccatttttgtcttcggtaaggtcataaatccgattatcagccaaagagactttatcaccgatttccggacggaaagtcagaaaagagttgccatcatagcggcttaacccatttagggtagccaaccacaagaagcctttgctatcctgatacaggtaccgaactgagttattcggaagtccgtcacttgttctcatttgtttggaacggagttcaatgccgccgtaagccgcattgaaaacaagagtcatgaacaatgtgaaaagtaatatgcgcctctgtgtcatatagattctaagattaatgataaatgccagacaaaaatagtcaagatagttgaaataataaagaaacaatccataaatagtatcaggaggatgcttgttttttaatcaaacatccccctgatatcaattctgtctaagggttctagtccatatgaaagacttccggcaatggtattgaaaccggtgaattgtccggattcacttccatgatatctgccatataatcccaccatttctgtacaatctctgtgttgcccaagtcctgcgaacctccttctccttctgttttctggaaagcaaatagaatattggtttctttatcccaatatatagaataatctgacaccccattttttgaaagcagtgcttttaattcaggccagatagcggcatgccttttttcgtattctgcttcatagcccggtttcagatacattttgaatgcttctcgtttcatggttcctatattttaaagttaatcttttatttattcactatctactgcaaagataggagctgttgtcttctgcttttcctgataatattgcacggcactgtcattcatctgaggatgctgggtgttgagcaaacgaatcatttccgcacctgcccaaagcaccggtccgtatccatgcgccgcatatacattgaccggacgataataatagaaagccggatcgaaagccataccggtgcctacgcaagtgccttccacctgtccttcttcatttatctttccggcgacggcatgccatcccaactgggcaacaggaccatacgctatcgcatcaatccaacctttattaatggcgtgtgccagacaatatacatagatagcagttgcagaagtttccagataagaatcattacggtcgagcaactggtgccaaagtccttctccactttgcaacgccgtcactccacgcacatgagcacggaaataatccatcaccttcggacgttggggataatcttccggcaatacatcgagcagttcacaagctgtcagcagcgcccatccattggcacgtgcccagcaaaaagccggatgatccgtactgctttccacccatccgtgtctgtacaatcccttttcggggataaacatacggtctgcaaattgcaggaattgcttcacggcttctgccagatatttattcttcgcttccttatcataacgactcatctgcgctaccgccggaatgcccataaacatatcatccagccaaagagtattccgctgaggacgattacgggcaaacgttccgtctgccagacgatattctttgttgatgataaaatcaaagtaattctgaattaatccgtcaaccggaagagactcgtctttcaaccgtaatttaatcatggcagtacatacggctcccgcatcatccaacgcatgaggagtcaggatttgcaacaattgcgaatcagtcttccctttttcttcatagacacgtttgaaatgcggagcgacttccgccaaaaagcggaaacgattctgaacatagtcagtataacgcttatcacctgttgtttcggcagccgctatcagagcggaataagtgacaccccattcataacttgccagacgaaaagccccgcgttccagctgcgcctcatcccccattgcagtataatccgtaatcaccttaccggtattcttatccactacacgagccggtgtctccttatctatatacgcaaaaacacgatcgatgtcttttttaacctgttcgggggtcaaatcaccataagtaccctgataagcaggttgcagtaaatgcaagggggtatttgaatcattgattactgctttctttttctgcgcacaggcaggtagtgctaccaataacgcagcaacggtcatcatacgataattcataatttactttttaggtattttacatcctctgaatatagtgccacgcaactccggaccaaaatagaatccgggctgagtaggctgattataagccacattttgagtcgcaatactgatacggtaaaccggatcttccaggaaagtatggaaacggtagtccgtaggaatggtagagacataaagcctcaaagctgtattatcggctgtacgtaacaatacttcttctcgccagtctcctacaatatctccttgcagacaaggagttgactttgttccgttattagaaagagcaccttcaaaaacagcgatacgttcacaaagtcctttctcccaattatatttactgactacattacgatccagcaactcacgcaagagatcaccatcccaccagacagccatattcgtagacaatcctctgactctggaagcaatcacttcccctttcacatttctgacacctttagaatctaaagaccacatttcaactccgggatgattaggatcaatatcagcagccatacaacgacctacatcagtattactctttatctggaaaataatttctcccgtagctgcatcccggaaagttgagccatctcttctgttctcgtggcaactccaaacctgcaatcccggacgggaaggatcaaagtgagtcagatgcatagcatcaccatgccccatgcgggtagaataaagtccggttccatcgttattgatcgtacattgtccatatacaatctcatcgcagccgtcaccatctacatcacctacacgaagattatggtttccttgtccggcataagctctgcaaccgggattattactgtcgaatacccagcggttcttcaaattcttaccatcccagtcataggcagccaatacagtacgtgtataatatccacggcacatcaccacactcggatgtactccatccaaatacgcaatacaagccagataacggtcgctacgattggcacgtccgtcgccccagtccatcagattgccacgttcgggcacataatcaatcgtttgcattgcttctccggtcagtccgttaaagatggtcagatactccgggcctgtcaagatacgtcctcgctcattccgataatccgcattcgcatcaccgatcacctttcccgttccgtccactgttccgtctccggtcttcattaccacttccgcacggccgtcaccgtccagatcgaagaccataaactgtgtataatgtgcaccggcgcgtacattgcgtcccatattgatacgccacaactgctgcccgttcaacttataacagtcaaaaatcaccggtcccgtataaccgtcatgagcgttatcatgtgcattggacggatcccatttcaaaataatctcatattcaccatccccgtctacatcaccgatactggcatcattcggagcataagtgtatgcttgtccggacggagtagtacctccctcggggcgtaccaaaggaatatttaaatatcctgtcggagcatctgccggcagttgataattgctttctgttttaccttttatagcttttaccgtatagagtgcaggttctgttccctgataagaatcctggaagaaagttgcatttttcagcggatgtttattcacctttttaccatcccggtatatatcaaaggattcgtccatcggatcagaagaaagatagcgccaagaaacgactacggttgacggattctcacgaatggcaattacgccacgtcctaaatgttctcgtttcagtttagtaaaatcatagtttggctgggcaactacaaaagtcgctattaccaacaaactaaaaaagatgcttgtacatttcatagttttatcattaatcaaagtgttcttatcatatttagaataacgtcgtgcaaaagtaagcgatatggtctacccataaaatagaatatcgtacaaatctatgtataaattgcctttttaaccatcgcactccctttccgaaggcattatggacaaatttaaatacttgtggacaatattccattgaagaggaaaaaagattcccctatctttgcccgtgaaatcaattatagtagctaattttatttataaacagtttttataccatgaagaaattactcctctcatttattacagcaactctcctgagtagcatgtctgccggttcagccggtgcgcaagagttgcccgaacaaaaggagactttggcaaccatcgtaaaagtaaacgactactttatgaaaaagtatgccgattataccctaccctcgttttttggcagagttcgccccagcaatatctggactcgcggagtatattatgaagggctgatagctttatatagcatttacccgcgcgaagattattatagctatacatacgattgggcgaatttccacaaatggggaatgcgtaatggaaacacgacccgcaatgcggatgaccaatgctgcggacaagtttacattgacctatataatatgtgtccctccgaccctaacatgatccggaatataaaagccagcatcgatatggtcgtaaatactccgcaagtaaatgattgggactggattgacgctatacaaatggcaatgccgatttatgccaagtttggcaagatgaccgacgaacaaaagtactatgacaaaatgtgggatctgtattcctatacccgcaacacagaaggagaagccggtatgtacaatgccaaagaaggattatggtggcgcgatcaggattttgatcctccttacaaagagccgaacggcaagaactgctactggtccagaggaaacggttgggtatatgcagcccttgtgcgtgtattggatgaaatccccgctgacgaaacacatcgtcaggactatatcaatgacttcctgaccatgagcaaagccttgaagcaatgtcagcgtacagacggcttctggaacgtaagcctccacgatgaaagcaatttcggaggtaaagaaacttcgggcacagccttgtttgtatacggaatggcatggggaatccgcaacggattactcgaccgtaaagaatatctccctgttgcactgaaagcatggaatgcaatggtaaaagaggcagttcatccgaatggtttcttgggctatgtacaaggaacaggcaaagaaccgaaagacgggcagccggtaacttacaaaagtgttcccgattttgaagattatggtgtaggatgtttcctattagcaggtacagaagtttacaagttaaaataagagcattatttatcaggtaaatgaaaaacaaggtatttcactgcttatgctggctcacagccatcatatgcagcttgcagatgcaggcacaaaacaacattgcttctccaatgaaagatgtgaatcaggtggtagacaacacactggacagtctgaataaagcacgcacggcacgccccgttgccggagcaagccgtaaaggtaacaatccggtcttattcctggtcggcaactctaccatgcgcaccggtactttaggaaacggcaacaacggccaatggggctggggatattacgcaggagattatttcgactccaaccgaatcaccgttgagaatcatgctttgggaggaactagcagccgcaccttctacaaccgcctctggccggatgtaatcaaaggcgtgcaagccggagactgggtaatcatcgaactgggacacaatgataacggcccctatgacagcggacgtgcccgcgcctccattccgggaatcggcaaggacagtctgaatgtgacaatcaaggaaaccggagtcaaagagactgtatatacctacggagaatatatgcgccgtttcatcaacgatgtaaaagccaaaggagcacacccgattttattctccctgactccccgcaatgcctgggcagacaaagacagcaccatcattacccgtgtcaacaaaacattcggtttgtgggcaaagcaagtagcggaagaacagaatgttcctttcattgatttgaatgatatcagcgcccgcaagtttgagaaattcggcaagaataaagtgaaatatatgttctatatcgaccgcattcataccagcgcttttggtgccaaagtgaatgccgaatctgccgctgacggaatacgcgcctgcgaagggctggaattggcaaagtatctgaaacctgttgaaaaggatgaggctaccggttcgagccgcaaagaaggacgcccggtattgtttaccatcggtgacagtacggttaaaaataaagataacgataaaaacggtatgtggggatggggcagcgtgatagcagatgagtttgatctgaataagatatctgttgagaattgtgctatggcaggacgcagcgcccgtacattccttgacgaaggtcgctgggataaagtatatcatgcactccaaccgggagactttgttcttatccagttcggacacaatgacgctggagagataaataccggaaaagcccgtgccgaattgcccggctccggagaagaaagcaaagtatttttaatggagaaaacaggtaaatatcaagtcatttatactttcggctggtatctcaggaagtttatcatggacgttcaggaaaagggtgcgatacctatcgttttaagccataccccacgcaataagtggaaagacggaaagatagaacgcaacactgcctccttcggcaaatggacacgcgaagctgccgaagctaccggagcctattttatcgacctgaataaaataagtgctgacaagctcgaaaagaaaggtatcaagaaagcggcagattattataacaatgaccatacgcatacttctttgaaaggagcgcacatgaatgccaaaagcatcgcagatggactgaaaatggctgattgcccgttgaaacagtacttgaaataagagacagactcatctgatatattcataaagcggttaatgcatttcactgacaatgcattaaccgctttcttctaactattattcatccatcggaatgacctcctgcatatagatagcatcaaggctccaaagtgccgcatcatttgtactgatgctgacgcattcatccaaaggggccggaacttcgggtggaaacagtttagtgatccggaaaggaggcgcaggtgtatgttccagtcgggtgaataaatcctcccatgcttcttttgccattagtgcatcccgcttgtggtaagcagcgtatgccatcagacgggaaattcggaaacggctatgattcaattcccacgccttttgcttataacgtgccgcatggtccagccacgcgtctttccattcgggaaggtcaatcatacgtatcatttcgttcattacctcaaaaccacccataatagtcattaaatgattcgaagattccagcttgggatcacattcactggtgatgattcccgttgccggatcgaaacccagcgctttgggtcccgtaaagatacggttgggcagggctgctatacttttcattccggctacgatcttatcccggtaaacagtgttgcctgtacgctcccactccgtcatccagtttccggcatacgccagccagtccggaccgatacgcagtcgggcaggcgccgtacagggatattcactgcgaggctgtgccagccgcatagggtctaattcatatagtttctgatcggcatcctttacttcagtcatcaagtcaccgcaacgttcatcggtagtgagataataatagaaacggttccatgcagcctgactgatccgggcttctttagcaccgcatccccaatggctgacattatgtcggctgcctaatcccgcgttcggtccgatatggtaaacgtccacttcggctgtatgacgggtcatagcttctgccatacgccagatatcttcacgacctgtacgcaggaagttgtaccacaaccacatattagaagccagttccgtattgtcccaggcaaatccacctatatcataacgccaagtatgacggaccgggtcataagcatgcatcacatctccataattccaaaagccataccatttattctgctctatggctttacgataaaaatcaatatatgcatccaggcgatcttctacccgcgcacgaaaagaagtactccggtccggaaggctccatacgccgaaagcctgctgtgcatgaagatagtctggtgtgggcagcaatattcccggttctgagagtgattcagcaacatcggcaaaagccttttttcctgcataacctttctgtggaataagtgtgagtgtagtggtgcgggcaatgccataaggagtactcattccctcctgaacatcttcgtagctggcattcagatcatgagcgacattatcgtagtgacgtaagtccatcggttctccttcggggctccataaccatgctgtgatcgttgcagatgaagttttggcacccgatatttcgagggatgaaggatatgactgccaaaaatcatgcaggcagagtcccaaacctcccgtaatatcaccgacaaaagcatagcctccgctacgggtgccggagaaagttcctatccaaggattattgtcattggcacgtttgcgaatggagaaagcatcagcagagagttgagacaagcgataatcgttccatgaagcccagttatcaagaagatcacgattcttcccgtcaaaagcctcgtaaggcgggatgcgtttgccatccatctgttgctgttgcagagaaagtgtatcctctttgccgagtgtcagtttacgccgtcctgccagcggttgtaccggttcactccagacgcctccattggcacaagagaaagcgacatgacggttataaagagcttcacgcataggagcatccatacgaatgcccaaggcacgaataaaatccttattttgatctccgtcgtacacaaagctatgtacgatcttgatctgctcacttccggcgtagaagtagagacggactacgaacggaagccactcccgtccggtttcacttctgtgggtgccttccagtttgacgagtgtccgcacctgaccggtacgttctactgtggccgatgtcaatcttccggtatagttagtaaaagtgatttgagaagtattttcaaggaccggttcgctttgagtgttgcatacaagacgtgctttttcaccgactttcactccttcacggaacagactgtcaatcataaaatctccctgacgagggatgtaagcggaaataattcctgtctctatgcggatactttgaggtgtttcaacaacagatagggataatttattgctacgatcatcggcagtccttgaagatgctttttcttttgacttttttccggtctttttgagtagcagtttctccgtatttttcggaataactccggctatccctttccatttcacagaaccatcgggccagtaggccaatgcccaagtatctgtcggaagcatttcacctttatcggtcatcagctgcaaagtgtgctccgggtataattctccttcattgaagggaactcccagacttaccgctttgttttgctgcggagtattaccgatccagtgtaatggtatttcagaagtttcctgcgacgaacattcataatgaaaattggcgatacgagttcgggacaaggtggtacgaaagccgaaccaaccttccgtaaggggttcggcatcgcggaaatccaccaatcgcactccatttatataataactaaccctattattttcattcgttatcttgatatgataccacttgtttgcctccaacaaatggtcggcatctgtatattctttcaagattgcgggacgggctttagtgtctacccttgccgcctcattgccgtcataacggcgaaaacgtgtagtagaattatgattcccaccgtatcccatatagtaaagttgcagggaataacagttcagaaagatgccattacgccatttctcacgtttccatatattatcgggatactgaggatccgaagccatccaaaaacaattcaagtcactcaagcgatcgccttctgcctcaacaacgacgcacgcatcgtactcaatggttaccttgccactcatcttttcttttcgccaaagagttaagcctttggaagaaagaatttcagcggtatcaccacgaaaggttactttataatccggagattcggactctactttccagtatttatgaaactgacgggcgttgagtccggaggttttattatcttgggcgttcgatgccaaagtaataagcaagaacaaaaaaatagatatgcttttcatatgctaatttaggataaggagttccattataaggaacattctcaatagtttcacatcacaaaattagaaaataccacccgaatgataaatagaatatcattcatttaaatggatatttgttcaacaaacggtcttcttccagcaaacagcaatatcattaattgtattaaaagtgacaaatacaaaaaaaacgatctgataaccaagcctaacttgatatcagatcgattcatttatcttcagcgtatatatctatttttgaaacacaagctcacccatacggtctgccgtactaaagactatggaacaaaggccatcttttatttgcaacacttccattccagccagttgaacgatctccggttcagctccggttttactactcaagatctctaacgtggcattcgacttcacaccaaccgacaaatcaccgtcacaggataacacatattgtcttccttccattacgttggtaatagcaacactattgacatcagtgaacaaactccaattattggctttatttaattcaatcatgtttccccatacaaaacgctgattatcggtgctcaatacacttgatacaaccactacatcaagtgatacgctgtgtccttccaaatctgttacattcaagacgactttgccgtatttcactccctgaatgtatatcagattttcacgatacttggcggtagcataaccttcttcagaaaaagaaaactggtatccaccgcttccgctttcaatctttagtataccttcacttccttctttgatttgaatagctatacgatcaagcttcagttcagcaaccgtatcttcgtctttgcaagacgaaaagaggctgagttgagataatatcaagacaaaagatattatataaatattaataaactgtttcatattattctaagtttatccgttttatcttttaaatttaagcgcaatagattttgtaatgtttccgtttgcatcttcaatgactgccttcacttcaagcacgccgctaaaatcagacaagtctattgagttcttatcaaactccgtcgtttcttcgccatctacaatcacatacatcttcgtgaacgatgcagcttcgggtcccactacactggctttacttccaactacaacaattgtcggcttcttcaaccaaccaaaatcaagatcagtaggttcacctgtagcaaaacatcccattccccaaaaacgtaattccgcatcagtagtcagctttccgaaattaacatcaggcaaatctccgttaggcttgcggtctctcatcaattccgcttcttccaaactaataaaatcggtttctatcacttcctcgctaccatcaaacgaattgttggatacttcgctcttcgccctgttcaccattacaatatgcttactacccgatcttgtaaccaatgataagttgttcttaaccatatgatcatatccgttgacatcagtcggaggaagcgccagaggtgactcacggtttgtcatattatagttttctccgctattgacagccgtattgctctcaaatataattccacctaaatgatgattggcataaaatcctctcaatctattgtaataagccaaactattccgtacctcatgttgagggatcacactgggtatggcaggcagtttgtcggcagccattccatagcctccggctttaaaaccggtaccgtcaccagcaacttctttggttccgggtttatacccattcaagaaagaccaacaattaattatcttcacagcctcgaagcaattgatcaaatcgaaaccatcatcactattgtaccatgcgcgacatccttcgaacacatttcccgtgcctttgccttcgccaactgaagatgagttaatgtgaccgccaaaaccatcaacattgccccccttaccaccttcggaaaccgaatcataattgttgtaagcatcacagttcaagatgtgattattgcttcctccaagcaaatagaaaccaattgccataccatcatgcgttctcaaatcttcaaatttgttattattggctccttttacaatacggaaacactctgattgcgtatgaccggtaatagtcacttgcgtaccgatgacatcaaatccctttagataaagattggaacctgtaacataaaacaccgtaatacgctgatctttcggttttacctgcgaaagatcaaaaatgggcctcccctgtttattcggattagccaaataagaaataggtttacctgcttcaccacttttattcatatgaaatacacaatgataaagtccgctattggtagttgtcatcggcacttgattggcgggaaccacatatgttcccggattgatataaactacatctcccgcaactaccacttcctgcacttttactaaagtggcaaaaggtttatctgaagttcccggattagaatcacttccctcaggatccatataatatgtcttttgtgcggctagagggactgataacatcagtcccaaaagtaagtacgttatttttgttatatctttcataattatctttttttgattgaaaaacatgctatttaatgagaagaagacttaccttgcaagtcccaaggtacgaaataagcaccattcataatcttggcttttacttctgcttgtttagcctgatcggattcatatttctgcccgacaaaatctgctatgaatgaatagtcattccaacgttttgccacacgaatcataagcggataagtttttccttcacaagggaattccaagaaggcttctttcaccaattcaatatcattatgctttttgatcttgtcctcgtcactcaaaccgtctaatttttgttctgctacaatctcctctttgatgtcttccggggtctgccacatatcgcgcttgccaagtcctaaaataccgcgaacaccgttatcggcatacgtgcggcggaatcccgcataaagtgttgtccacaatccccagttgcaattcagtccttgccattgttcgcccaatactacaccggctccgtagaagggatccacaccagtattcatcaagacggataccggctcaaaacgtcccatattattcagcgcttcaatcgccatgaaataaagatcagaagtgtgataaatcattatatatgtatcatcatgagcaacagtatgtccgctctttctaaatccacggtatttgcgtatcgcatattccacatctttttcgatttcctgaatggctctgaaacgcgtatcagatgttttaatagccgttgcatcggcagacggattgaaagtaatatcttcaaaacgttttgatcctggcacagaagcacgcatcatatagcttccgctacggtcaaaatgattcaataacgcattctgctgattgtatttgtaatcatacataataacagattcagctgctgtcagcaccggcatctcagaatcatattgctgaccgtaattgctaccgtaacttcccgaacgcatatacttgatattagcaacatttccttgatactcagccaacgcaaaagttctgctcatttctccaagaatcgttgtagccgctttctgataatcccctttccaaagtgcgatttctgcctgtaatacgaagtatccgggaaccatcatattccatcttttatattcatcgtttgtggaagtagctccgttagctggatcaagccactcattccatgacatattgtatgtaccgtttattccatcaaagcctgtattcaacagtttgtcgcattcatcgacaagctcactcaggttcttaggagtctggctgacgatatctttcatgctttgcatcggatcgtcgaaccatatagcttgtccatatatctttgccaacatgagataagtccatgttttcaatctcaccgtactactaatcagacctctataatcatcgtcatctacggtagtaacatgtgtatccctgtattcttttgctttctgcagataatcattgcaagcaataattacatcataatacttagcagggtcggcgtatgtgttaccgctcaaatcatcatcataattatagatgctataaaggtctgccggtgtattttcggtaggttccaacagctctccacgcatatcggtcagataaatagctttgtctccgatagcttgtatctttgtgatgatacccagaaaaccggaataaagctcgctgccttccttgatatatctgtcaccattcaaggtcgtatcattgtttggctcaaagaagtcactacacgaagcgaatatcatcgccaacacccccataagtattatttctatcttaaactttttcattttcattagaattttaaattaacgcccattttcactgttttgggttgcattagctttgcattatcaaaaccttgcatattctcagcataagaataagagaattcagggtccattcccaaataatctgtgaaggtcaacaggttctcgcctgtcacatatattgttcccgaacggaagaaattccaaagtgttttagagaaagtatagcttaatgtcacattcttcattcttaggtaagatgcatcttccatccagcgagaagagaaatagctgttgcccacaggatctttccatgttgccttcggcatatcggtcttctgtccttctactgtccaacggtttacggctgcaatactttggttgttggtagtagacacagcctccaattgttgtctgacagcattgtatgcgatgttgtcttttgagtatgagaactctgcagaaagtgcgaatcctttgtatttcaattgtgtatagaaacctccaaagtacgagggagcagcactgccaagaagaacacggtctttatcgtcgatgcggttatcaccattctgatctacaaaacgtacatcgccagcattataacgacgtccggtacggttactgagatttgcagcgtcagcttcagcttgtgtggaatatactccgtcagcctgataaccgtagaattggtaaggagattctcccacacggttgaccatctgcacaccattatcgtaactcaacacaatttgttcttcaccacccaatgacttgatcttatctctggagcgagtgatgtttccacctacaatccactcgaaattacgagtgcgcaccaatgaagcctgcactgacaactctatacctgtattctccaacttacctacattcgcataataaggaaccgatccataaacggatgaaagaggcatggctgagatcatatcgctgatttgattgttgtaataatcaaaagatacgttcaggcgattgtttaatacagacaaatccaatccgagattcaaagaagcattcttctccggtttcaatgatacgttcggaatattagaacgaacgatggttgacaactgcatgtaaggcactgtagaataatagtatccacccatctgtgaagagaagcgtgagttacctgtcagtccgtattcggcacgtacattcaacttattgagccatgtagcatcaagaagcggtttccatccttttcccagcaaggttactcctactgacggatatgtatagaaacgagctacatccgtaccggtagaagaagctgcatcaacagctatattcacagatgcctgtaccatattattgtaagtatagtcggcgtgtccgtaaaagtttgtccagttccagctattgatataacccaagaagcgtcttccgtcaatcgtgctgcctaatgtctggtaaaagtcattaccagtattgcgcccttctcctgcatcatattcgtttttagtagtcatcaactgccatccggctattgcattcaactgatgaacataattgaatgttttcttataacttgcattcaagttggcgaaaaagtttgttgttacagctactccgtcgcttaccgcattatttcgcaaaccatatttatcgcttagcggcactatagtggcttcgcttgctccggggataaagagatgttcgttatcgtaattataatacagacctactgttccggtcagtgtcagttcacggaaagggttgtatgcgataccggctttcatattcagatcatattggcgattgcgagaatccaacgtgttaacgatagctaaaggattgctgacactgtaatctcggctcttgctccgtccatagaaatgcgatgcgtaagtctttaacgtatttccctcgcggtctttttcgtatggactcaggaaaggagatcttgcgtaagctgccaatataggattcgtcgtaatatccatgccctgcatctgataatgtccgttcatataagccaaacctaccgttgcaaaaatattcagttgtttattgaccaatacattagcattcaataatgtatgaaaacgttccatacttgtgttatccatcaggccattctcgcggtaataccctaatgataggtcgtacttagcaatattatcaccaccttctactctgaaaagatgatcggtggaagcggtgttcttgtaaatcaaatcctgccaatctgtattattgttatacagatagttgtaacgtggatcattcggattctgcatgaaagggaaattgttatagaagttctgcgggtccttagaaatagtcattcccatatctgccagatactgtttgtagtcatccagtcccatcaccggcatccgcttatcattccagttgattccgtatgatccataatagcttactcgcgtctccaagtcattggatgccgtaccgtctgtttcgatcaagattacaccattggagcccattgaaccatacatggccgcctcagcacctttcaatatagtgatattctgtatatcctgcaaatgataaaactggaagatatcgcgtgtaaagccatcaatcagtgccgaaggtgttttatcgggcatgtggggcacaccgtttatcacaatcaaaggagcgttatcaccagtcaatgtgcggatccctcgcaagttataataactgccttctcccggcataccactactgcgtttcacttgtaaaccggcaacttgtcctgtcaatgcgcgatcaatcttcgtagttcccggcataaaatctttcttagcgatattagtagcagccgtatagtcttccaactgcatttccccttcccgacggaaggggagaatcatagtctcattatatttatattgattttccggaatcaaagtaatcacaatattcgaacgttctctgattagctgtttcacggagaaataccccggagcccatacagaaatctcgccggctttagaaagatccttcacttcaaactggaatgcaccttctttgtttgtaattacattcatcgtattcagtactgtgacaatggcgccttcaaccggctgatttgtcgctgacaaaatcttacctgtcagtttctggcctccttgtccccatgtatttgccaccccacatacgagtagtgcagaaatactaagtattctttttatctttttcatatcctgtttatcaaggttaatacaaatctactgttggacggaaacaccaagtggtgggttccatatcactttttgcacctttcgtaaattcaatcgttacttcaagttcttccgttttgtcaaatatgacaaccccaagatccgtagatccgtcacggtcgtacctgctatctttgtaaagttcgctatatccaccgccactacggtcatgattggaacctttcatggtagaggatggaatagggccgctttcacatttaggaatcttcttgccattcaaataaaaggttgcatttacttgcgaacgagagccgttgaatcccatatagaaattgtatggtccggcaggtattttataaggtacagccgtaaagcctgtagtagaagccttgtcttcaaccagtcgatagcatttgaatttaaaaattcctggtcggtcagtatccacaacccacaacatcatagatctacaataaacagccggcagccacggtttgggctgattagcacctacatattgttttacacggttcatttgtacgttctcaccaatatctttcagataagtactgatgtaattatatccgggataatagtactttttatcttcatccgtcaattggtcaaacgtttcaaaacgttccttgattctccatatcaatatcttgttggtcggtattttcagtgaagttatcttataagcaacgccgttactcaactctaccggattatcaagatctaccttatttactgttgtacgccattgttggtcaaaaacagaatagaagtcctgcgttgaagtcggatcactttcattataaataaagtcttgttttacatactttttactaaagaaagctgtctggaatatccagttgttcaaaatagagtcttcacgttccatattccacgatttcaacttctcttttgcttctttcaacgcattttctatcaagtcattagatggtaccagcaatgtagcggtaatgttctctgaataaagatctaacttcttatctgcaaaatactgactcttttctgtgaatacagagtcatataccgtatttcctgttttatcaattcctataggtgtacttgcagctttatcaaatactctttgtgtacggctcaataccatttccttaaaaatagagtattcttcatccggcaaatctttcagatattccattaatgccttaggagtattgatataatcttccaaatcataaatgtaggcattgttagttttaatcacctttttcaccttcgaaccattgaaataaattcccggttccatgccatccacaggctcatcgtagattcttacagtcacatacttaccgttccacatcaacagacgctgtccatcttccagattactgggtgaaagaagagcatcagtaatgtgtgcttccgccttaaatatctcttcagcggttgcttgtccttcgctaccttctgcttttgtaacaggttggttggcattagcggtagattcattacccatcaccataatagtatacatcaggtttttctcctgccaagttttaatcacgcctgttttatcaaacagttcatacattttactataatcctgagcagtctttaaaaagtcggctgccgactcatccaccgcttgaatctccgtgttgtcaatcaccgtttcccacttggaataatgcgaatcccaagtatccgtacaggcgcagagtccaatcgaaaccaaagctgatgctatgatatatctaattttcttcatggttgttattctattacaggttcaaacaatatataatcaaaatacatacggaatttattatgcgagctggctgcaggatctaccacaactacattcaatgtgtgagaagcagtcgttgtaaattcaaacgcagtttcctctccgctcaaattggatgttaacggtgtattgaaacaatcttgtacatctcccgtctttccatcgtaaatacgtttgttatcaccacctgccagtcgtttagaatctaatctaaaattggtcaaaccagcttgactcccttctcctctttcaccgataaacttcatagacggatcgtatgcgtaatacaaagtaattctatactttccggctaaaatgggaggaatagtcaaatctaatgtaccgttgtatcctatattgaccaccaaggcatcattgttcatcaacttagtccagttgcccgaagtgttagcacctttggtgcaatatgacaaataactccagtcgcttgccaacgtaccgctaggtcccatttctattttgtaggatgaaacttgtggaacgatctcttgtctgccgatgaatttcgttaatgcagtgtacgtatcatcatcgtcacgtgaaacctgctgataaagttgtccttttcctttagcagcaatgtatgaagatacttcgggataatcacagaaatcaaaaataacaggtattggttcaaaatcggttttcactggcagatatccgtcaattggttggatatatccgtttttcacaatctcgtcagcttgttcctctatgaatttaactccattatttaatccgttttcagaaatcaagatcaagtcgtttgtagctctggtattcaacatctttctatattcccatgtttctctgtcaaaaggtttggagaatgtgcgaagagattcaagagtatgttctccatccattatatggtaagctataaacctgttcaactcattattgggaagttcataatcgtcggtcaatgctccaaccttggcagccaaagcactaaagctggtgataccttcctgtgcaaatacagcatcggatacggcaaatactgtgaaatatttacgcaattctactctcatgcctaacggaccttcgagtacggaattcacaacactcagcgaatcgctccatgctgttttctccaacgcttcacagaatatcttataattacccttgtctgaaagacgtgcgtagatagtctctactgccggactcaacacatcatcaagcacatatatacgcccattggctgtgcgtatagctaattcgctaacatgagcttctttgttaatgtaaacagatttatcgccaccttcgttaccgaaagatactttcaatgcatctcccgaaagtgttctgccaggcagttcaccgcttttcacaaaatcctcccgatcaatggagtcattgatgacatgatatgtaacaagagtgcgggcatattcatatcccaaatcttcgatagaagtgactcccttcttttcataaaagcggagaactgcatcgttagtaggtgccaacacagtgaaagcatcctctgcacgatttacagcgttgaacaaatctccatatttcaacactttcacccattcggagaaatcgtcaggacggttctggagataggttgccgcaggttgtacatcatatactttaaataccgtatccttgtacggatcatcacaggaataacaagtgatgcacaaaatcattaagcaaaatcttacaatattcttcatagtatatattaatttgcagttacatcataataaggattctgtattaaattcgggttactgtcgatctcaccctgactaataggcaaataccaagcatcggtattcttcagtaccgaacgtatccaactggcgctaaccgtagaattgttctcaatgatcatattgataaactgatctttatatttaaagttctgtgacctgccgaagcgtaaaagatcataccagcgttttccttccgcagcaaattcaagatcacgttcctgcaacaagtatccgagcatattttcttgtgatacggcattcgtctgaacacttaatgtagtgacgttggcacgggtacgtattttattgataagttccaaagcttgtgcgaaatttgcttcgccgcctttccagatcaatgcctcagctttcatcagcaatacatctgccatgcgatagagaatccagttggcatctttataagaacgagtcgtagacaatccatcctttccgccgattctgaacttaaagggaagatagccttctgtattggagttaccaataacggttcccgaagaaagaacaaacgtattgccataaccacgaacagtgttggaagtcacccattgatcagtttgttcgtcaaacaaacgcttacacattgcgttcgagaattgaagactggcaactgtcgattgtgtccaaggataaacgttagatggcgaaggatatgtactcgctgtagcatcatcgtcaggagattgattgcgtgactgatcaaagtttagttcaaatatagaaccgttgctgttgcccgggaagaagatattgtaccattgttcggggtcttccacaaatgccggacggaaagcggaagttgaattaatcagcatatctgcatatcttacacaaccatcgtaatcttcgctccacaaacacacgtctgccatcaatgcatacagtgcccatacagtgacgcgtcctttactcatgccggtccagtcttcatcatcatacatttctttagctgctcctgtggaaagtgcattctcgatatccagcttgatttgtgcgataatcgtctcttccgaagatttgggtatatcgacagcatactcgtctgtcatatagggttccagaatcaacggcacttctttaaagttacgtaccagcgtaaagtatgtccaagcgcgcataaaatatgcttccgccatatttgaattcattactgcctcatgatatgtttcatcctgcctctttacttccggtgcatatttaattatggagttcgccacattcaatatagaatagaaacctccccatttgcattcgccggatgaagaattcaactgaaaattctgtaattcctgtttcgatttacctgaataagcataaatggatgccccgcgaagttcgccccaataaattaatgtaggaaccgtcagacgcatgttttgatatccttgtgctagtacctcttccacctgctcttttgttttccagtattccggagatacctgttcgttcttaggcagtacgtctagccaatcattacaactggaagtcagcaaagttgctccggccattgctatgtatattaataatttcttcattttgttatcgtattagaaacttaagttaaaaccaaaagtatatcgtctggacacaggtgtcgttgcaccgtccgtagccaggtctgtcggtctcgacggtaggtttacttccggatcctgaccggtgtaagaagaccaagtaaacaggttgtatcctgtaacgaaacatgtcagtgaagtgatacccaatttattgcaaatgcttttcggaaatgcataattcagtgtcaactgtttcaaacgaaggaaggaagtatcttccacaaaacgatcagaacctaaatagttgaatccttcgccatacaatgcacgcggtatatctgtaatatcaccttcgttcttccatcttctcaacacagccgtactctgattggcgttaccgtgcatggactcattattcatacgagccgtattcacgactgactgtccgaaacgtccgtggaagaaagtattgatagaaaattgtttatacttgacagtcaatcccgcaccaccagtcaatgtcggattggcattacccaaatagacaatatcatattgattgataacaccgtcatgattgatatcttcgtacatcgcatctcccggctgacaggtagctgtcagatttttcattacgattggtctaccttttgcatcattcattacatttccttcagcatcacgtgcatatgttgcatcggtgttttgatatactcccttgtaacggtatccatagaacgaaccgatagggcgtccaacttccgcacgggcagcatatgccccattctttggtgaataattctcctgtaccatattggcaggtagctcagtaatcttattttcgttgcggctaaagttcacataaccgttgatacgccagtctttattctcaaagattacgacatctgtacggaactcccaacctttgttctccattttacctgaattaaaataactaatcgatccgaaactagtggttgaaggtagtttgtagttcttttgcagcaaatctttcaccgtcttataataataatcgaatgtaaatcttaaacgaccttttaatacggaagcatccagaccataattatattcggtagaggtttcccatttcaaattatccaactgcatacgagcctgctttgtagccgacatgttcatatagtctgttcctttcacgtaggcgcccagataaacagaagcaccgctgggagcacgtccactctgcccgatactgaaacggaatttcgcttcgtccagccatttatctcttgctttttccataaaaggctcgttctggaagttccatgcaagacctacagcagggaaataacccattctttcattacgtcccatagcagagttaccttcagcattaagagatccgtgtaccacataacgattcagcaatgtatagttcaatacccctacaaaagatacattacgtgtttccgattcgcttgaattcatgtcactaatagtagttccgactaccggatcggagagatcggaagaagcattaccgtatacttcgctattatagcctgaattgatatactgaccggtacgaaccaatacattcgcaataatattatgtttgtcattccagttcttgatatacatcaacttattctctgtctgcaaagccaattgatcggaataagcgtccgcactctgattggcatatttgttgacttgttccactcctgttacaacttgtggcagaaagcgacgtgttttaattgcacgcatattgatagaagcccaacctttataataaaatcccggtaaaatctcataatcggcacggaatgttatcttaccttcacgctgcacagttctgttgatagcttcatgtgccatagcaacaggattataattactttttccattaaacgaaccttcaaaattaggatcgtggtaagtaaagtattcatcagtcaatgcacctgtcaagtcatttacggtaaatggcgatttgttcggcattttactcaatgcttccgagcgaatagtgtttgtccagttcgcatccgtattggtctgcgaataagaaaagtcagcaccgaattttaacttattagaaaattggtagttaataaccattgaagtattcaaacggttcatagacgtaccaatggtagtacctatatcactcatatatcccaatgaaaaacgataagttgctttttcaccaccaccattcattgaaaaactgttatctgaaaccaacgccttttggcgcacataatccaaccaattggtattttggttatactcatcatagtatctccagtccggattgtcaccgattgcaggagcatcagacaacatattgaggtatttatttcccggattattcagaccgatgtatttggcagaattccagatagattcctgcataagagaagtatattccttaccattcaacatcgggatagtactcggatcttccttcattgtccatttggaggagaatgagaaacgagttttaccaaccgtaccttgttttgtcttaataaccaatacgccattggcaccctgagtaccccaaatagcagtagctgatgcatcttttaatacttcaactgaagcaatatcattaggtgagatatttaaaagagcacccaaatcttcttccgtagctgtgctgaaattgaaatcatcactgatttcagtcggataaggcacaccatcaataacaatcaacggatcggaagatgcatttaacgtacttgtaccacggattctgatagcactacggctaccggggtctccacccaatacaatatccacaccacccaattgtccttgcagcgcttcctctatagatacaacaggtgcagcggcaatcaacttttccatatcaactttctgagtagccgaaaccatttctttatccgaaatacccaaatcatttctatttaaccgacgggccgaaactactacttcatccaccgccattgattctgactccagagtcacattgagcagagtttgccctgtatactttatacgctttgttttcattccgatataggaataaacaattgtcagatctttctctccctctgggattttcacattatattgcccgttcaggtttgtgataccaccacccaacgaacggttctggttgtttactagattgacatttacaccaaccaatggttcagcagtttttccaaacaattcggtaaccgtaccggatataaccttctgtacctgccctgccatttctatagaacaggacagaaaaatggctaccaatgtataaaagactttatttgtctgattcatgattaattagatattcagttaattaaaaacagcgtctatcaggtggaaagcaccgtccataaaagcaaatgggaaattctcgtatgatactatcttacatgcatttccgtactgaccggtggtctggttctgcaactgcaaggtgatgaaagcgccgttatcagtatacttcacaggaatattattgctgttacgatattctcccgatagccagtcaggtgatccgagatacggacagcctgatgcaaccggagcattggtaggcgtaaagaaataattgagcagatattctcgtaataagtattgatttgtaatctctccttgaagagttggtgatggcagacttaaatctatcgtacctttcactcccggaatacgatcattatccaaagcctcttttagtgcttcatttgtcggaatgaacccgataagacgtcctgccaatctgtaatcccaagcaagtacaccgtctatagtagcaaacagttcggcttgtctcattaaataggcgaatacaaaattcggatatttcgtttctccaatagaggtcaacattgtcctcaggcttgtatattccaatccatccaatttcccgaatacaccgaagtcactttcatattcatatactttaccgtttgcccaagatcctccggcatcattggtcacctcttttacttcggtgaaaagtgtaggaataacagtttgcggatcttgacctaatacactgttaaacacatagttcgttgtcattttcccatctttcacaaaccaatatgttccaccatcctgagtagcataaacagcccaaggcgtattaaagttaacatctcctactacagttccaccactgacgattcttttcaggtccgaagttgaaacagccacatcaccatcttctccggatgttgccagtgtattaccgactccatcagacatcagacgcatgtcactgatttcatatccgctatttttagtgatcaacatcgtatagtttgtagcagtggtagtgtacgcagccatctgattactctgaaagatagcatacaacgaaagcaggtaatctcttttaaggaaagacggtcccatcacggtactgaatatttcaggcatcgggaaattgcttaatccataaaaactaccgttcacacagatactcttatctttcacatcgctcaactggaaatcataatgcgaacccaaagagttggtaattccgctaatttcgtcagggaaaacgatagaacctccatatactgattgataaagcaatatcttagtaatcaacgggtccaaatcagttaaagaagaatatcctccagctttccaatatctattgaagaaagtgttgagtgcctggttggacggtgcaaagatactataggagatagaagctaattccggataaagacggaagttaggtgtcggccattccaacgcgatattcggaagcccgtttggtgaatgtgcatgcagaaaaagactatctactcctactgcttttccataatcggcagacaagtccttatcataggcataagtactgtactggctataaaagtcgaggaaatcggaataatctgattttttctttaaaacatcataaatagtttccaatggttccaacaccctgtctacattatatatatagccgttattggttatgatttggtattctttaacacttgcattcgacacattgaacccgttatctcccgtccacgtagagttaggatagaaaaattcataattcttcttggcatctatacctttagaggcaaagatgtggtgagagaatacaggcaagaaccgctctaaatgatagacggttacagtattgtttgttgatggatccacttcctttgtaataggactggtgctgtgtgtacgaaacttgtaatacattcccggttgtaaaactcccaattcatcatcgtcatcatcgtctttgcttgttgcactgtcttccgggcggaagttttcaagatcactcttgctataagagtagtagattaaatgataaccaatcagtttcttcaaatcatctgtcggtatatccttcactgaaacataaccgtgttcttccagataagcagcaaacgcatcattgtccggagccatgacagttgcgacactcttaccatcaagaataggcttaaagcctgataactctgccgcttctagaaacatggagaacttacctccatattcattagaaagaacttcccaagctgtacctttcagccattcgggtttttcataatgctcatccatcttgtcctcacaagagagaaaaaaaggtgagaggagcaataatagcagccaatgccgcttacgattcatcacatttctcataatattaaaatctgttaagtaacaatataaatctattttatctattttttaattaaacaaaagttagattctgtttttcttcgggcactttatcataatacctgtgaaaaactgttgcaaacttaacgacttatataagaaatagcaatgaagaatcgtacataaacatggaaaataccgccttttgaacgaaaatacatgctctgaacgcgttttttaaataagaaagagtgtagataatacaatttattccggtttttcttgaaacaagaataaccatatataaaagcaatatggcaaacttttcaaatataattgtgtcgacaaagaagttgacaaattaaaaatatatgcgataaacacaaattcatgtttgcgaagtacaatcaagaactataaagattattttgccattcttattgtcacttgtcacttttacaacttaaacaattgattatcaaagtaataagagtgacaatagacagtgacaatagagtgacaatagagtgacaatagaaataataaagctttctattgtcacttttactttttcctcttttatatcttaaccaccagatacacagtccctttattcgtatgtttgcaaggaatcccctctttctgaagcagccgtccaaagtgatgcgccttgccggaagacagcgtaatggtcgttcttttttgcagataatccaatatttctaccggagataagtattctccttccttatcatcccctgcaaccttgaaataacgatagaataactgaatagccggcggagtctgttcaaactcccgattcccctgtgccaggatagcctcatccttatcgtcaaaccaataccgctcgccatgacaaatctcgtacatagcctgtgcatacaactgctcatagtcaatcgggcgtgccgtatcaatcgtacccgtcacctcaacgcacataaaacgacggctaccggacggatcagtcagcaaatccttctgattgctggtcgcgataaacgaagcataacgccgcaactcctgcaccgaattactgtacgatttacgaagattgactaccggcttttgcagaatatgcttcaaaaagccctgctgcgtcaaagtaatctgatcgaactcgtcaatattgatcagcgcaaagcgattcagatacatttccgcatcccgcttccggctgaaatcaatactatccgtataatatccgcgaagtcccggcggtatcagatcccggcaaaaggtagacttgcgtgtcccctgcgcacctaccagcaaaggggaagtactgttcgcatgctgccggtcatacccacgccaatgagctaccatgttgaggaaccagcgatggaaaagcatcgtccaatgcggattagcacatggcacacggtctgccagttccgtaatgcggtcttttttatcccaattaggaagatgaaaaataaattcttccaatggattataaacagatactcggtttgaatgcagataacggtccacatcccggtcccacaccgcaataccctcactttgcgcatccagcagaatactattctgcgcccgtttatccaacggacggaaacgaaaataaaacgagcatcgttcccggtattccacttcacctatctgtgtattgtagcggaattcataacgacggttcataaactcctctgtctgcatattgagatattgctcttttgtcagcccgtttttcttgccgaagcctttgcattcctgatacacattgcctatcatctcgcgaaccagcacagcctgcttcgaatgataataccgatgaatggtcctcctcaccacttcctcttccggaataccggaaaggaaacaattttccgccaaccggactaccaggggctgcaaatcatcattccgcctccacccctcttccatcgactgaaaagtctttcgcaaggcagcctcatacatcaatgccagcgcatcttccgtatcatatcccggaacggcacgattcaacggagacttttccggggtcagcttctcctgataattcatttctttcggcatcccgaaaggctgagaaagataaaacggcacggaattttcccgatagaaaggttcgggatcgtgactcagccgtgaatattgctccaaaaccggctctttcaactgaatatcaaaggggatttgcggctgatagcatttcaccgccaaacgatacgcatgtgcctgaaaaatttcagcttcttcctgcgtctgcggcaacgtaccgtccggacgggtaaaaagagtccatatcttcacggaatttccactcgcccccatgtatgcaaacatggtctgcggcaattcagccgcttttttcttgaccagatccacttctacttttcccgccaacggacctacggtcagttccacgatgccattatatactttcatccgcttcacgccatttacacgtccgaaaacggcagcgggtattactttgggaagttttccggcaaaactgcaagattctccgggtaaaacaaaatgcagggcttggcgcaatccggtcaccggacgggtcttaatctctgtttttatcttctctatcaacaagttaaaatctaatacacttaatgcttcgactccatctttctccctgatctgtgttatcttcattacttttctttaatatttatgtatatccctcaaaggtaggcataaaacagacagcaaacaacctttctattcattattattacagaatatttatccgcctttccattcttccggaagctccttgaattaatagtaaataaaacgttcattaagttgtttagaagcttagattaatgtatctttgtagtgataagaaatcgttttacgtacatggtcccatcggtccacgtatgtgaactattgggttcacgtacatagtccgaacggttcacgtacgtggaacgaaaacgtgaaacagacaaaatatattagtcgagccttgtctacatgttaaggttactagtgtttgtactaacacacgcggtatcaattgagtaacaatcctattaaccaacaaaaaacaagtgacgctatggcagcagattatgactttcggcgaaaaccgaatgaaaagggagacggagaagtacagcctctgtatccccgaattgtatccaaaggaaccattgacagcaaacggttatttcgtgaaatagccgaagcctcttctttcaccgagggagatttggcaggtatcatggtagcttttcaagagaaggtatcctattatttaagtgaggggtatcatgtgaaactgggagaaatcggatatttctcctctagtttgaaagcacgtccggtgatggacaagaaagagatccgttcggtctctatctctttcgacaacgtaaatttcagagccactccctggtttcgccgacgcagttcggggacggtgacccgtgccaaattcggatttcaagaatcatcgaacttgccggaagagacacgccgttcccgactggaagcctttttagcaaagaatcacttcatcactcgaagagaatactctcagattacgggtttattgaagggaaaagcactacgggaattgaatcttctggtagaaaacggagttcttaacactcgcggatatgggaaccgggtggtgtatttaaagcctaataatcagtagattaaatcagtaaaagatacaataagggtgataacagaaaagaggttactattctattatcaccctattatcaccatctattgtcacccgtttttcattgataatgaaccggttagttctacaaagtgacaagtgacattaaaaagcatcattaaactccagtgtatgacgctcaataacttctaccgaatcgagcccaagcatatagtcacctttggccgcctcaatcatagctttttgttctttctgaaagtagacaggggcatctttacgtaaaggtaaaatctttagttccacctttttgccgacgagatctgccatacggacccacatctcctttccattccagaagttatctgctacaagcctgccgtcagcatacacacgggccacatcaccccgataatttatacggagaaaaagattatcataattatttattccagatgtatcatagttaatagtgtataccgcagcttttgcaaagtcctcttctacaggttgcgcagccactgcctgacgacccatggggacaacacggggagcatccgcttttttcacttccgtgactgtggcggcaatgacaggagactttgtccatacctcctccacgatgcatgaatcactcttatacagaataccgccattcttggcataaagcagtttaccgtcaattttataggcagtctttgccttttcgtatgagagcacacagacattgagcttgcccgccttctgctgcttgttaagtttacaagtatagaccttgccgtcaacggagatttgaggctttttacccctgatttcgatgaaatagataaggtcatccactttgcagaatggttctacagtagtccagtcaatggttgcacccccagtccgatagtctttaaaagtgacatgggacgtcccgctctcattcttgatacgcacatagtcattatagaattcgaaagcaccccggcgagcataatgcctgcttaatgagtcaacattcatctgcaagagttcactgccccagtctgtcaacatctgatggataaaacgtccttcatgaaagggagtctcgaatacttgtcccacttcgccaagaggagcctgaaaatcataggtcatatgaggcaggtcattatgattagtacccggagaggcttgcgtttctcccatagtgtgaagaggattgtatggattggtgccaccgtgatacatatagtatcccggaagattggagccactacccagcttgcatataaccagcggtttaagctcctttccattgatatttatccgacgatgatacgccggcatcataccaccgcccaactcacaagtaaaatagggatatgacaattttgaactgagagagggggaatcttccgacaattcctctttagagaatgtctctgtggcaatagcactactcatacgtttgtctctcataatgaaagcatcggcataactgcccggcatatcctccagtttccggtcccagaatccgtcggcatagtcaccataaagcggcaacagctgcccgaaaacctcttttccccgaagtgcaggccaaccggtacgtgtatagaacgggacatcaaatcccgccttcacagcaatatttttcaatgcctccagataatcccaaggaccgcgactttcgttctcgatctgcacgccgaccacaggaccgccatctttccacaaaagtccgttaacctgagcaaaaatagtattataaagctccgtacaatcttcaaggaatccgggagtacgggcacgtatcttatacttaggattctgcccggctttctcatgtacccatgaaggaattccgccttgatacacttccccatgacagaaaggaccaagacgcaacaccagcatcacattttcttctgcacaaatccggacgaagcggcgcaggttatgattgccgctccagttccattttccctcttccggttcatggtgaatccagaagatatatgtagaaatgatattgataccaccggccttcattttgcggatttcccggcgccattccgactccggtacgcgggaatagtgaatctcgcccatgacgggaatgatatgcttgccgtcaaggataagccccttgctatccaccagaagagttttgccttcgggtgttgcagatgtcccaaaccggaaagttccttgtgctgaaaccattgacaacgacagtacaaacatcaataaaaatgtgatcttctttttcatggtaatctttcaattgttagtctttcaattattcaactaccttccgattcaaacggaaagtagagagaactttcttgccggaataaatagtcacaaggaagttatagtcctcacctttttcaaaatcagcctttgtcgcaaagcggatgtcagctttttcattgggtttcaaagcaggtacggcagcagaagccactttgaccattttgccttctttcttatactctatcttgaccgaagccttttgtgagctaacttgtccgaagttctgtacttcaatattcccgttccagcctttttgcgattcagagaatacaggggcacgtgcagaaagaatcggttccacataatcaacatacggcaaacgcgcatatccgtaaagcatctttccgtttttatatctgcctatcaatttaggagcaaattctttctctgtaatcccatttccttttccgtcgaaagtaatgatcaggtcatttccatcattctctgttttcaatactttacttcctctgccataattcacttcttcggaagcgccaaaacgcaaagagctgatatccatatcggtttgtggatgaaaaccttcttctgcctgtactttcagccggatagttttcgttccagcggtaatgggcttatcattcaacactgtcagcaatagtcccggattcaatggaatactgatattctttgaactgtgattatcaaatggcttatcttcatgtttcaaagtatcaatgaccgcaaaattagcctgaatagcacggccatacttatcttgatacattttcagacgttcatacttgaaccagccttcagaatgtccgtcctcgtgtacggcaactcccggcatgtaggcctctcccggatcagtaacccaattgactccgtcctttgaacgaagataaaaggcaatacggcccaaccagtcattgacaatcagatgatactggatatgatcgcgccagatgacagggtcttcaaaccgtcctttcacatccggataaacacgacggtctgtcaactggttatattccgacaaaccatcccggctgatccagattccaccgccacgacagaccattacatatgaactgtcttcccgttgggcaaacgaaagattggacaatccttcgatgattctacgatcgcgcgcattgaagtcgaattttccatattcccattttccgttgatatcatccgcaacataacgtccgtctatgacatacaaaacatatcggccgtcttttgcctgaaacatctccggattatgtccttttccgatgatattaaccggtttgaacggaccggtcagattatcactcacggtattgaacacccatgaatttctccactccatatgtcctttaggagaggcttccagccatccgcaaaccatcagatgatatttaccgtcttctcctttccggatatttccaccccaataggaccagatacggtcttcaataccattatcaacataacgcggacgcacatcggaggttccccacgtgtcggatgacagttgattgcctttcatcggcagaaaacgatccataaaccgggcacctttcaccagttgactccactccttgggccgttcgcgttctgttacttgagagaaagtggatttactcacaagtagcaacattaccattaatactaatttaagattttttccgtacatgtttttcttctgttagttagtttgatagttcgtttgattaatactattagtattacgacaaaagtaaatcaatccctcattagtgaatgataacaaacagggaaaaaggcacgtaatgctttacgtaaataatacgaacattcccagagtcctaatagcccaaccaaacggttgataccaacaactgaatgcaaaatactcttttattcatcatagtaaataacactattttcttccaaactaatattgcagcagaaaactctcggcaacttttagaaaacggtcatgtcctttactgttcagatgcgctgtatcagtattattcttgcttttctggaaatagattcttctgaaagtatcattatcggcatagatgcttccttttcttgcgcaatcaaaaataggaatactataattgccgcagacttcaatcatcgcatccactactttttccgagtcacttcctttaaagtttttgcagttccagcgggtaaagaaaaagattttcgctgtcggatatttctcgactaagcctttgcacagaatttccattttatccttgaagttatcaatacctccgatagaatccagtttaaatgcatcattatgtccgccaatgacaatgacataatcgaggctatccgccatctccgcatatcgcagatacatcgcttttccccatcgcgggctggaataagctatgctattcccattctttccataattaaaatactccataccgtgcttctttgcaaacttataatgccatgtgttctcaaacggctctttatgatttctcacatagctgtcacctattactccgatccgcttgccgttaagttcgtcagtaagcgctataccagtctgtgctttcccatccaaaacggacaacgcacaaacgattaacaataaaaagatttttaaatgtgtcatcactttatgtatttttcatttgctagcaaagataagggcagttgtaatgtcagtacatgtaaattcatacgttttcctttaaattcatacacttttcatgctttaatccggttttttacgccccaattctccaagaaacggacgattttccatctttctatacttatttgccattggagcaagttacgactttgcatatctttgccaagaaagttatccatttctacaaaagactacaaacgtatgaaaaaacatctgattgcctggggcattttatctaccatgtttatggcaaatacttttgcccagaaagacatcgaccgtcctattatgggatggagttcatggaacacctatcatgtaaatatcagtgaagagttgataaaacagcaagctgacgcattaatcaaacacggactgaaagaggcaggctacaactatatcaatatagatgacggcttcttcgggcatcgggacgaaacggggaaaatgcatccgcatcccgaccgttttcccaacgggatgaaagtggtttcagactatatccattcgctgggattaaaagccggaatttactcggatgcaggagacaacacctgcggatctatctacgacaacgacgcaaacggagtgggctccggactatacggccatgaacagcaggatatggatttatatctcaaagaatggaactatgattttatcaagatcgattattgtggcggacgcgaactggggctggatgaagaaaagcgctacagcacgatttgccaggctattgccaatacaggaagaacggatgtatctatcaatatctgccgatgggcttttcccggcacctgggcaaaacgactggcacgttcctggcgtatcagtcctgatatccgtcccagatggaattcagtaaaaggtattatagaaaagaacttatatctttccgcctatgctaccgacggacattacaacgacatggatatgctagaaatcggacgtggactgaaacccaacgaagaagaagtccattttggaatgtggtgcatcatgagttctcccctgctgatcggatgtgacatgaatacgattcccgacttctcattgaagctactgaaaaacaaagaactgatcgcactgaatcaggatgtattaggacttcaggcacacgtcgttcaacatgagaatgaaagctatgtactggtaaaggacattgaacggaaacgcggactgacaagagcggtagcattgtataacccttccgaccagccatgtgactttatcgttccttttgaaacccttgaactgggtggtaacgtaaaagtacgggacttaatcaaacagaaggatcttggaaaaatgaaaggagaaatacggcagactgttcagccacacagcgtaatgatatgcaaaatggaagctgaaaaacgactggaacccgtatcttatgaggctgaatgggcatatcttccctgctacgacgatctgggaaagaaatccaaaccaattgtttatgtacctgcccccgattgttccggcagaatgaaaatatcccgactcggcggccgggaagagaactttgccgaatggagcgaagtatacagcgaaaagggaggtaactatgaaatgactattttctactcttgcgacaaaaaccgcaaactggaagtttctgtcaatggaacgaaaacagtactcaaagatttgaacagtaacaatgaagtgaaatctgtgactatccctgtcagcttaaaacaaggttacaatacggtgcaaatgggaaatgacttcggatgggcaccggatatagatcgttttacagtatccagacaataaaatcctcataatatcaattatagaatgaacaagaaatttagatgcttactggtatctctgattttcacagcaatgtggaatgggactaccatacaagcacaagctccccatcccgaacgcatttatctttcgggaacaggcattgacgacaccaagacctgggattttttctgttctgcgggacagaatagtggcaaatggaaaaagatcgaggttccctgtaactgggaactacagggattcggagaatatacctacggtagatggtataccataaaaggacaacgccccagtgatgaaaccggaacttaccgctataaattcgacgcccccaaatcatgggcagggcaacgggtaaagatattctttgacggtgtgatgactgatgcagaaatcatgataaacggcaagccggcaggtgagatgcaccaaggaggcttctatcgcttcaattatgatatcaccgaattactcaatcttggaaaaaagaatcagcttgaagtgaaagttgccaaagaatcagccaacagatcgatcaatgccgccgaacggaaagctgactggtggttgtttggcggtatataccgtcctgtatggctggaagtcctgccacagatacacatggaacatttcgtactaaatgctgatcatcaaggaaaattacaggccgccgtagatatggcaggagatgccaaaggacatgaaatcatcgtatctgtccgttcattaaaagacgggaaaaccgtatatacctccaacggacaaacaacaatcactcattcaatcagtaactccgataaggagcagatgattagcggtgaatgggcaagcatcattccctggtctacagagaatcccaatctgtatgtagccaaattggaattaaagaatcccgaaggtaaaatcgtacaaaccagagaaacacgcattggtttccgtaccgtagagttctttccccaggacggcgtatatttgaacggtaccaaactagtggtcaaaggaatcaatcgccactcattttctgtagacggagggcgtaccaccagtgctgcattaagccgaatggatgccctgctcatcaaagaaatgaatatgaatgctgtacgttcgcactacccgcccgatgaacattttcttgatatgtgcgactcactgggacttgtctacatggatgaactggcaggctggcaaaacggttacgactccagagtcggagcaaaactcgtaaaggagatgattgaacgagacgttaaccacccctgcatcattctttggagtaacggaaacgaaggcggctggaatacgcaaaccgatcctttatttgcccaatatgacagattacagaaacgccacatggtacacccctgggctgactttaacgacttggatacacatcattatcctacttatctgacaggcgtagcacgtttcaccaatggttataaagtattcatgccgaccgaatttatgcacgccatgtacgatcagggaggaggagccggcctgcgcgacttttgggatcgctggtgtaccaatcccttgtttgcaggagggttcatctgggtatattgcgatgaggctcccaaacgcagtgataaaggaggaatactcgactctgacaagtccaatgcacccgacggagtagtaggaccacgtcgagagaaagaaggaagctattatgccatccgtgcacaatggtcgcctatccagttgaaacctcttctcattactaaccacttcgacggccgtttcctcctgaccaatgaatatacttttaccaatctgaaagattgtcgtatgacttataaggttttatcatgcggcactcctctccagggaaacgcagaagcaggaaaggtgattgccgaaggaaaagtccaacttccatccatcaatccgggagaaacaggcactgcccgttttgaactgcccgattcattccgggaaggggatgtgctagaactggaggcttttgataaagaaggaaaaagtatctgcaactggacttatccgattcatctggcaaaacaatattttgaacgtaacctggcgcaaacgacactcactcctgctcctcaaaaagcagaagcccgacaaacgtctgacgccatcgaactaaaaagcagcaaagtcagcataaccttcgatgcggcgaccggtatgatccgtcacattaaatccggtgagactgaggttccattcaaagatggtccggtagcaataggtatgaagatgcgatatgaaccttcgctcagctatactcgtcattcctccgacggcgccatttattgtgccaaatataaaggtgcggcagattccattgtctggcgtctgacaaacgaaggtttgctctatatggatgcaatcttattaaatcgcggttccggtgacggtggcttcgacgatgctttcatggatgcacaggttttcaatctcggacttagcttctcttatccggaacaaaactgttcgggtatgaaatggatgggacgcgggccatacagggtatggaaaaaccgaataccaggaacgaactacggtatctggcacaaagattataacaacaccattaccggagaaagttttgagaatctgatatatccggagttcaagggctaccatgccaacctctattgggctacactggagggcgagaagacttcatttaccgtttattcgcgtaatgacggtactttcttccgggtattcactccagaagaaccggcaggacggataaaagataccatgcctgcattccctgaaggtgatctttcattcttgctcgatattccggctatctgctcgttcaagccgatcgagcaacaaggtcctaacagtcaaccgggaaatatccgaatcaaatcgggagatgaagggctacatctgaatctgatgtttgacttccggtaaacaattaatgtacgctatatatagctgacaaaaaaatgtaatataaattccccgaatcaagtttcaaaaattacctaattaatgaagaaacttaattcggggaatttatattctctatttacttttaatctttctgtgaataagttacattcttttctaccacattctcaacattacttactttcttcacaaacttcttaaccgaaccgacctttacatcctttatccgaacattcttcacaggaagttcagcgtttcctttcagttcatataccgcgtctgccgattcgcaagttactttatccatatagatgccatcgatacgagtgattcgcttttcataagtcgggaccaagtccttccactgataaagtacctccgtatctatttcaagtacccgttgggctgttccggatgctacatttttcatatagatattctctataaatcctcccctgcgatgattggttttcacaaagaaaagacgcatcactgaattaggtgctgtacagtcatgcatatagatattccttataccaccggagatctcactgccgatgcccagtaaggtatgtcctttcaatatctgacaatgacggatcacgatattctcacaaggggtattcagacgccatgcgtcctgattacgaccggctttgattacaacagcatcatcaccctggtcaaaagaacagtcttctaccaaaaagttacgactcatttcaaagtcaataccatcattattgtgtccatgtgcccgcacatccaaattacggacgatacctccgtcacacatatagaggtgaatggtccaaaacggactctcacgtattttaaatccatccagcatcacattcttacagcgattgaaatgtatcagatgtggacgcaaatgattttcaccggtagccatctgacgttctataacaggtacattggtcgaagctttggtatataattccttcagtgcctccaaatgaggtttagggcgtttgaaccatcctttccatgtacccatcttcggctgtaatgtacctttgccgctgattgccacattttcacattcgaatgcatacagtagcggtgagtaattatagcactccaatccctcccatgaggtcattaccgccggtagatagtcttccggattatctgtaaaactcaatacggcattttcttctaaatagagatttatattgcttttaaagtgtacgggacccgtcagccaaatgcctgccggaacaaccacacgtccaccaccggccttattacatgcatcaatagcagcagcgatcgctttggtattatcaacttctccacccggcacagcaccaaaatccgtaatcttaaaatcccggtccggataaataaagactttaatcggttgcatcggaaaaggagcttttactttgacagttttataattaccgcccgccattaccgtagcaacagacaacagcccgaaacacatacataccatccattttaaaaagttcagtttcattatcatctcatattaaaatttatccaatcaattttatttttgaattttcagtgtcaccttaatcataccgccatacgggtcgaaatcgaaaagaactttatcgtcagtgatctgtaccggcaattttctttttccttgtttcacagtcactttctttatttccttaccggtaatcaccattgtcaacggttcaacgaacagttcctgatccaatttaagttccggagtaatcaacaaggtattctttttattcacaacttccagtttggtttcctccctttccttgatataagaagccacttcacgaaaggttcctacccatatttcattctccctcgcttttacctgatccagatgatcccacaaacgttgaggattacggaaagcatcatagccataggttaaaccgtgtgtcattcctactccccagtcattggtttcaatcaaggtattcacccatttctccaaatcctgcagagtcgatttactcccaatcgaacgctggtgagttcttgtccctacacgattctgtacggcaattctccgtccttccgcttttttattattattgggatagcagaaagtacggggcattacacctgtattggcaaatatagcactatcattcttaaaaatatcctcttttatctcttcgataggaaaaagtgcaaagtttttatgcgcccaaccgtgattggaaatctcatgaccattatcagacatttccctaagttgaggccaggtcattcgtgtagtgtcggtaatgttctcgttatccttatttatattggaaccacatatccagaatgttccccggaaacctctcttttccagttggggaacaagaagtgtataatgttctgccaggccatcatcaaaagtatagctgatagcacaagccttatcctgtttatatctggcaatttgcacattccagtctgctcccgacaaatagccaatactgattaataaactaaagataaagagtgagaatgtcttcatcgttctgtcgttttattggtttatcttcacattatgcatcgtaaatgaatcgattatactctgatccacttttcctttcttagcctgcactgtgagattctcaaaacagaaatctgacaatttatattgatcagacttcttaacattaaagaatacattacaatcaatgtctatattgcgcatcgtaatgttattagaataagaaaggggagtatctttacgatctttcaaatcgtaaaactgcgtccaaggagctatattcagacaattctgtacattccctgttatatcctctaccagaatatactcatatttttgcggtgtatccgggcgcatctttagagttagaagagcacgtgctctatctaccttacaacggcggacaatcacattccggctaaggatagactcactaccgcaagtaaaggcgctatgacagaatccgtaggtacagtcttcaataataatatcatagttttctccattattggcatctttatctgcccaaggtccttttccacctttcagcgccaccgcatcatcattgacagacatataacaattctttatcagcacattattacaaacatcaaggtccacagcatccgtactgggagcttttacgggactggcaggcgaagtaatgcgaagattcaacaacttcaaaaaactgcatttataaaaatgagtgctccagaaaggagaattcataatcctgatcccctcaatctgagtatttttacagttggacaaataaataatgcgaggacgcatctcttccatattagtgcaatccggatttatagaacgccgtaaccagaatgatttccagtaccgaagcccgtttccattcaatgttccctttccggaaattgtaaatccatccagtccatctgcatttaccaaagccatgaagtactttaaagtctgtccctccatacgggtcattttcaccggaaaatgactgatatcatcacttccctttaatactgcattttcttccagatgtaaatgagtattattcttaaagaaaagtgatccgcttaagaaagtacctttgggaataactataactccacccccattccgggcagccagatcaatgacttcctgtattttcttcgtctgtacaatcgtactgtcattcactactccataattggtaatgctatatttctttcccaaagcattcacatttacttccttattttccctaaaccagtcagggattactttaccatcaggaaaaacctcctgagccaacatctgtgtacaacacagcattaacactaatccaacaatttgtttcatcacctaatattatctttttaatcttatcaaccactatttataatgaaaataccaatacccctgctgtcggaatctctttcgtccctatcaaaaccttacttccttcaggtaagttgaatgtataaggacgatcagcataattcaacactatccccagaccattccggtattccaccgtaactccataaggcaaatccatcacaggaatactcagttgcgcatataattttttcaagatatctttttccaatgcaccattatggctgtccactccgacatatgtaacagtgcctttacccagttttcggaacgtgacagcaggaccaccttcatagaattcattggcatacgtcgcccaaacctgcgaatcagatgcgggaatcagtatttctccccatgtattccactcatattgctttccattcatgacaacagtacccggatcttccggtaacagcagatcataaaagttcatttcatttcccgtcagaggtgtgatcatagaaccgaaaggagcttccggcaaacggccataacggtctttctgtgctgtacggcaggtcaacacaagattaccaccatttttcacataggcaatccatttatttactaattccttatcagccagttggtaagcaggagctatcaccacaggatactccgtcaactccttctgttcggagacaaaatcaacgggagcaccaaatgacttcaaagtccggtaatacttctctatatgtgcaaaagtatcccatgtacggttctgtttctgccgctcgatgctccaggaattctcgtggttgaaaaggatagcggtacgacgtgccagatagtcggcaggcttcgtttcgcgcggagcataatgtttccggagttctcttatctcttttataaaggtctcatattcccttccgccgggagtgacggttacgccgtccgttcctactatcccataatgatactgctctgtgccgtacagcggctggcgatagcgatacgtacagataaaatcgcttccaccggcaaatacactccacatccacagacggacagctcccggaagcggttgcggattaatgctcccccaattcacttgtcccggttgcaactccatcacgccatacgtaccctgtataggacggaagaagtcattcgcccatgcaatacgcaacggatttcctacccgatatccacggcgtccgataccttcgttatcgccatacaccatatagcgtgtataactctggaaatcgagtgcaggactaccgccgatatgtccttcatcatagttggggatatagttggtagtaatccactggttctttgcatattttctgatcagcagacattgttcattcagaaaatcattggtctgcgcagcggcaaaacgacgataatccagaatctgatgatgattcataaacatctggacacgcttaggaagagtgatttcatcaaaagacgaataagcctcactccagaaagcggttccccacgcgtcgttcagcaactgaatgttgtgattgtattttgcacggagataatcacggaaagcctgttccgctttcggattatagtcgaactgtacggcaggttcattgtcgagttgccatccgacaatacgggaatcattgccataatgctgtgccagtttctcgatcatcttatacgataattcccgatagagcggcgatgcaaatgaggcatgctggcgggcaccgtgatcgagaaccgtaccatcttcattcttcaacaggatttcgggatacttccggctcatccacaccgggggcgtggcagtcgaagtacacataatgactttcagatcatatttggcagcaagagctactgctttatccagccaggcaaaatcgtatcgtccttcttccggctccagctgcgcccatgcaaactccgcaaagtgagtaaactcaaatcccagttcatgcatcttcttgaaatcacgttcccactgactttcatcccagtgttcgggataataataaactcctgtcaatgtcaagtccttatcgttgaaccaggaagaagtttgtgcttttacagattgatgcttccggtcatctatcagagactctacgacggaagcatctaccgcaaaggcagtcccgtggcggattcccttcggaaacgaaacctgatcggatacatcttcccacgtttcaccatgatccagcgaacggacagctccgtaacgatgatcacgatacttatcaaaatacacataaagcgcatcacccacaaaaagaggtgccggtccttccgcccaatattttccggtaatcggggcggatacctttgtcggaaaacctttggcaatattcttcgtgcgtgtcacacgcaggtttttctccggaggattggagttctcgttcttgacgaccatgatcagatctccctgtgtcggatctttcacgatagccgcgtcgatcacactgaaatcgggattgaaaaacatcttcgtctttgagaaagtacgaaaatccttcgttgtaacatagtacatacgatggttcagccctttttcgctttcgctggtaggcacttccttgtggcgtccggggatggtggtcgcccaaaaaatgtaatatgtttccgaaggttcgtcataaaagagttccggcgcccaacaattatgagcttccggctcgtgcatcatcacgggaatagcctgttgctcactccaatgaatcaaatcacgggaagaagcatatccgatgatccggtccgtccaactggaagtccagaccatgtgaaatgttccgtcgggagcttggcatatactgggatcacgcatcaatttatctttaccgacagacggagtcaaaaaagagcgtccgccgttcaaaggagtccagttcagcccatcataactgtaggcaagatgcagaccgtccttgctgtcattgataaaataagaaaagagataagcagtctcacctgcaaagattgtcattaccgaccaaagagttaaagccatccaggcaaatacttttttcatggttcactttaagattaaaaagtttacttcgcaaagatatggtatcccccagaatttcagaaatgaatgatgatggagatattatcatattcatgtagtttcgtacaccaaccgccataaaagccgtttttgatacaatattctatgtatctgtacatctttctattttatagattactcaaaagctctactttagcagcagatttttaaacgtagtggaaaacatatcaattctacatatcatgaaacaacttttagtaagtattgccattgtattcgcctctgtactgactgtaacagggcaaaaccactctttcagcctatccggaaaatggaatttccagatagaccgggaagatgcggggatgaaagaacaatggttcaataaatcgctcgacgaatccatcaatttacccggttccatgcccgaaaagctaaaaggggacaatgttaccgcacgtacccaatggacaggaagtttatatgacagttcttactatttcaatccttacatggagaaataccggatagaagggcaagtcaaattacctttcttcctgactcccgacaagcactatgtaggtgtcgcctggtatcaaaagaaagtgacaattccatccgcctggaaaggggaaagaattctcctctttctggaacgcccacatattgaaacaaccgtatgggtaaacacgaaagaaatcggtatgcaaaacagcctttgcgttcctcatgtatacgacctgacctcggccgtcactcccggcaagccgtgccggctcactatccgggttgacaaccggattaaagagatcaatgtcggtccggattcacatagcatcaccgaccagacacagggcaactggaacggaatcgtaggtaaaatcgaactgcagacgactcccaaagtctatttcgacgatatacaggtatatcctgatctgagtcacgggaaagcgctggtacgcatgaatgtaaaatcctcttcttctgccaaaggagaaataacactttctgccgaaagctttaatacggatacccgccaaaacgtcctccctgttcaacagaccttccgtattcaggcaggagataaccgggtagaaatggaactaccgatgggaaaagacttcctgacatgggatgagttcaatccggcactctacaaactgacagccacgctgaacagcggcaagcagtccgaaaagaaacaggtacagttcggtatgcgtgatttcaagatagaaggcaaatggttctacgtcaacggacgcaagacaatgctccgcggtacagtggaaaactgcgatttcccgcttacaggttatgcgccgatggacgtagcttcctgggaacgggtattccgcatctgccgcaactacggattaaaccatatgcgtttccactctttctgtccaccggaagcagccttcatcgctgccgatctcgttggtttttatctgcaacccgaaggtcccagctggcctaatcacggtccgagactgggcaacgggcagccgattgacaaatatctgatggacgaaaccatcgctctgaccaaagaatacggcaattacgcctcttactgcatgctggcctgcggcaatgaaccttcgggccgttgggtaccttgggtaagcaaattcgttgattactggaaagcgaccgacccccgccatgtatatacaggagcttccgtaggaggcagctggcaatggcagccccacaatcaatatcatgtgaaagccggtgcacggggtcttagctgggcaggctcgcaaccggaaagtatgtccgactaccgcgccaagatcgattccgtgaagcaaccgtacgtttctcatgagacgggacaatggtgtgcattcccgaatttcagcgagatacgtaaatacaccggagtgaacaaggccaagaactttgaaatcttccgtgatatcctgaatgataatcacatgggcagcatggggcacgactttatgatggcttcgggcaaacttcaggcaatctgctacaaacacgaaatcgagaaaacattgcgtacacccgactatgcaggattccaattgctggcactgaacgactattccggtcagggaactgcattagtaggtcttctggatgtcttctttgaagaaaaaggctatatcaacgcagatgagttcagacgtttctgcagcccgaccgttccgctggcacgtattcctaaattcgtatataccaacgacgaggctttccatgccgacatcgaagtttcccatttcggagcatcccctctgcaggaagccaaaacggtatacagcatcaagaatgaatatggcaaagtatacgctcacggcactgtaggcactcagaatataccagtcggaaatctttgtacgctgggaagtgtagacatgaagctaagcggaatcactaaaccgcagaaactgaatatggaaattcgtatcgaaggcagcgatgccgtcaatgactgggacttctgggtatatcccgcacaggtagaactgactcagggcgacgtatataccaccgatacactagacgcaaaagcaatctccatcctgcaagaaggaggaaacgtattgatcacggcagccggaaaaatccagtatggcaaggaagtgaaacaatacttcactcctgtcttctggaatacttcctggttcaagatgcgtccgcctcataccacaggtatcttcctcaacgaatatcatccgcttttccgtgaattcccgaccgaatatcacagcaacctgcaatggtgggaactgctgaacaaagcacaggtcatgcagtttaccggattcccgaccgaattccaaccgaccatccagagcatagacacctggtttatcaaccggaaaatcggaatgttattcgaagccaacgtactgaacggcaaattgataatgaccagcatggacatcacttcgaaaccggaaaaacgggtagttgcccggcagatgcataaagccatccttgactatatgaactccgatgctttccgcccgacagcgaatatcgctccggaactgattcaggaactattcaccaaagtggcgggagacgtgaaatcctataccaaagattcacccgacgaactaaaaccgaaaataaattaaactaattgatgactgatatgaaaacaacatttctcggacttctgctgctgacagcaacagctatcagcgctcaggaacaagcccgcacattccaactggcagacgccccccgctacagcgaggaaacaggttacggatatgaccttgcacccactcccgaaaaagggagcaaagcacctttcttcttttctgtccgtgtgccggacggtaactacaaagtaaccgtacgcctcggaagcaagaagcaggcaggtgtaactaccgtacgaggcgaatcacgccgtctctttatcgataatctgcccaccagaaaagggcagttcacagaggagacatttatcatcaacaaacggaatccacgcatatccgacaaagaatcggtacgcatcaaaccccgtgaaaagacgaaactgaactgggacgacaaactgacactggaattcaacggtgacgctcccgtatgtcagagcatcagtatcgagcctgccgacccgtctgtaattaccgtattcctgtgcggcaacagtacggtagtcgatcaggacaacgagccttgggccagctggggacaaatgattcctcacttcttcggcaccgatgtctgtatcgccaattatgccgaatccggcgaatcggcaaatacctttatcggagccaaacgcctggcgaaggctttaagccagatcaaaaaaggagattacctctttatggagttcggtcacaacgaccaaaagcagaaagggccgggcaaaggagcttactactccttcatgaccagtctgaaaacattcattgacgaagcgcgtgcacgcggagcgcatccggtgcttgtcactcctacccaacgtcgtagtttcgacgccaacggacatatccgcgacacacacgaagactatccggaagcgatgcgctggctggcagccaaagagaatgttcccctgatcgatctcaatgaaatgacacgtaccctgtacgaggcgctgggaccggacacttccaaacgtgctttcgtccactatccggcaggaacgtatccgggacagaccaggaattttgcagacaatacgcactttaatccttacggtgcctatcagatcgcccaatgcgtcatcgaagggatgaagaaagccgttcccgaactggcgaagcatctgaaaatagacccggcatacaatcccgcacatccggacgatgtgaatactttccactggaacgattcaccgttcacggaaatagagaaaccggatggaaattaaaagaatcctatactaaaagactatatgagaattaaaaacctccttcccctacttctggcaggctcgttgatgatagcgtgcactcctgccaaacaagccggcaacagcttcgaatgggggcaggtacctcagcaaccggatttatcgtgggcagacagcgtaggcagccgccaacttcccggagacaagatgattatatccgccaattcctttggcgcagtagcagacagtaccgtactcagcacagaggctattcagaaagcaatcgacagttgcgctgtctccggcggaggaacggttgtcctgcaaccggggtattaccagacaggagccttgtttgtcaaaagcggcgtaaacctgcagattggcaaaggggtgactctgcttgccagccccgacatccaccattatcccgaattccgttcgcgcatagcagggatagagatgacatggccggcagcagtgatcaacattgtcgacgagaagaacgctgccatcagcggagaaggtacactggactgccgtggaaaagtcttctgggataaatactgggaaatgaggaaagaatacgaagccagagggttacgctggatagtggattatgactgcaaacgtgtacggggaatcctcgtcgaacgcagttcggacatcacactgagcggtttcaccctgatgcgcacaggattctggggatgtcagattctctattccgactattgtaccatagacggactgactatcaacaataacatcggcggccacggcccaagcacggacggcattgacatcgactcctcctgcaacatactgatcgagaactgtgacgtagactgcaacgacgacaatatttgtatcaaatcgggacgggacgcggacggactgcgtgtgaaccgtccgacagagaatgtggtagtgcgcaactgcacagcccgcaaaggagcgggactgatcacctgcggcagcgaaacttccggcagcatccgcaatgtattaggctatgaccttaaagctgtcggcacatataccgtgctgcgactgaaaagtgccatgaaccgtgggggaactattgagaatatctacatgacccgtgtcagcgcagaaaatgtccgtcaggtattggcggcggatttaaactggaatccgagctacagctacagcactttgcccaaagaatatgagggcaaggagattccggagcactggaaagtgatgctgactccggtagaaccacccgaaaaagggtatccgcgattccgtgacatatacctctcacaggtaaaagcggaaaatgtagatgaatttatttccgcttcgggttggaatgatacattgcgtctggaaaacttctatctttacggcatcgaagcgcagaccaataaaccggggaaaatctgctatacgagaaactttaatctatcggaaataacattggacgtcaaagacaaagatgctattgtactaaaggaaaatgaacaaagtaatatccacttcgactatgttaaaacaactactgaccgtcgtactgctggcaatctgcctcattaacgtacaggcgcagcaactgactcctcccgccggaactttccgtctgggtatatcgaaaggaaccgacagtcactggctggctcctcaggaaaaagtgaaaggaatcgctttccggtggaaagccctgccggatacccgcggctttattctcgaagtagcggtcacctccttgcagcaggccgacaacttattctggagcttcggagactgtcagccggacatggatataaacgtgttcagtgtagaaggacaagctttcacctgttattatggtgaaagtatgaaactccgcaccttgcaggcagtcactcccaccgacgatatccgtttgagtaacggccgtcaggacaagactcccctcttgctttatgaatcggggaaacgaacagaccgtcccgtcctcgcagggcgctgcccgctcgcagcaaacagtaaactttatttctgtttctacgagcaaaatgcacgagcagattataattattttatgttgccggatctttttgcaaagattgatgaacttaaacataataaaaaatgaatggagatactattgattatcatttagcttaaatccatacaaagatgaaaagaatatatctactactcagcctactgaccggttgcttgtatatgcaggcggcaatctataacgtcagggatttcggagcaaaagcagacggaaagacgattgattctcccgccatcaaccgtgccatcgaagctgccgcacaagaaggcggaggtaccgtatatctgcctgccggagaatatgcctgttattccatccggctgaaaagcaacatccatctctatctggaacaaggcgcacgcatcatcgccgcctttccgggaaaggacgaaggatacgactcggcggaacctaatgagcataataaataccaggacttcggtcacagtcactgggagaactccctgatctggggaatcggtctggaaaacatcaccatcagcggtccgggactgatctacggcaaaggactgacccgcgaagaaagccgcctgccgggagtaggcaacaaagcgatcagcctcaaggattgccggaacgtcacgttgaaagacttctccatgctccattgcggacacttcgccctgctagccaccggtgtggaacacctcaccctgctcaatctgaaagtagataccaaccgtgacggattcgacattgactgctgccgcaacgtacgcatcagccaatgtacagttaactccccatgggacgatgccattgttctgaaagcctcttatgcgctgggacgtttcaaagatacggagaacgttactatcagcgactgctacgtcagcggcttcgacaagggaagcgtactggacggcagctggcaactcgacgaaccacaggcacccgatcatggataccgcaccggacgtatcaagctcggcacggaaagcagcggaggtttccgcaacatcgtcctcaccaactgtatcttcgaacattgtcggggactggcgctcgaaaccgtagacggcggtcatctggaagacatcgttatcagcaatatcaccatgagggatattgtcaacgctcctatcttccttcgcctgggtgcgcgcatgcgcagtccggaagggacacccataggcaccatgaagcgtattctgatcagcgacatcaatgtatggaacgctgacagccggtattcttccattatcagcggtgtccccggtgcatctatcgaagatgttactttccgcaatattcacctatattataaaggtggatacagcgaagaagatggcaagcgcactccacccgaacaggagaaagtatatcccgaaccctggatgttcggtacgattcccgccaaaggattttatatccgtcacgcaaagaacataactttcgacggtgtccgcttccactttgcacagccggacggacgtccgctctttgtgaccgacgacgcagaaaacattgaatactatcatacaccccaagaataatgaacaagaaacaactgatactcctctgtatgctcgcagcaggcggaagcatacaagcgcaacagtggccggatgctccggcagaagcccgtcccggcaccagatggtggtggctgggaagcgctgtcgatgaaaagaacctgacttacaatctggaagaatacgcgcgtgccggcatgggcgccgtagaaatcactcccatctatggtgtacagggcaatgacgccaacgatattcagttcctttctccccgctggatggaagtcctcaaacacacacaggcggaaggaaaacgcaccggcatcgagatcgatatgaacaccggaacgggatggcccttcggaggaccggaagtcagcatcgaagacgcggcaagcaaagccatcttccagacttatgatatagaaggaggccaggaaatcgtgcaagatatcaatgtgacagacaagaagcaacaaccttattctgtcttaagccgtgtaatggcatacgacgaaaacggacgctgtatcaaccttacatcccacgtcaggaaagacaaactggaatggaaagcccctgccggaaaatggaaagtgatagcgctgtataacagcaagacacgtcagaaagtgaaacgcgccgcccccggaggagaaggctacgtaatgaaccatctttccaagactgccgtcaagaactatctctcccgatttgaccgtgctttcaaaagcagcaagacgagttatccgcatacattcttcaacgactcttacgaagtctatcaggcagactggacagaagactttctggatcagttcgcccgcagacggggatataagttggaagaacattttccggagtttctggacgaaagccgtccggaagtcagccgccgcatcgtatccgactatcgggagacgatctccgacttattgctggagaacttcacccgccaatggacggactgggcacacaagaatggcagcatcacccgtaatcaggcacacgggtcgcctgccaacctgatcgatgtctacgcagccgtagacatccctgaatgtgaaggattcggtttgtcccaatttcatatcaaaggattacgtcaggattcattaaccaaaaagaatgattcggacttgtcgatgctgaaatatgcctcttctgccgcacatatcgccgggaagccttatacttctaccgaaacatttacctggctgacggagcatttccgcacttctttgtcgcaatgcaaaccggatatggatctaatgttcgtctccggcattaatcatatgttctttcacggcactccttattcgccgaaagaagccgaatggccgggatggttgttttacgcctctatcaatatgaacccgacgaacagcatctggcacgatgccccttcgttcttcgattatatcacccgttgccagagtttcctgcaaatgggtaaaccggataatgatttccttatttatctgcctgtctatgatatgtgggatgagcaaccgggacgtttgctgctattcagcattcatcacatggccaagctcgccccgaaatttatagatgccatccaccgtatcaataacagcggatatgacggagactatatctcggacaactttatccgcagcacccgtttcaaagacggacagatcatcacttccggcggaaccggttacaaagcgctggtcgtacccgccgcccatttgatgccgaatgacgttctggttcatctgctgaaactggcacaacagggagccactatcgtattcctcgaaaactatccgacggacgtaccgggatacggtcaactggaacagaagcgcaagacttatcagcagacgctgcaaaagttaccttccgtttcattctccgaaacaacggttactccggtaggcaaaggcaagattattacaggtacggattatgcgcgtactttagcaagttgtaatattcctcaggaagaaatgaaaaccaagttcggactgcaagccatccgcagggtgaacgatagcggacaccattactttatctcttctctccaagataaaggagtgaatgattgggtgacactgggaaccaaagccgaagctgctgccctcttcaatcccatgaccggagaatgcggagaagcaaaggtacgtcaaaccggagaacagacacaagtctacctccaactgaaatccggtgaatcggtgattttgcagacttatcaacagccgctgcaagctgcccggccctggaactatattcaggaacaaccgttcagcctcagcctggatcatggctggaaactacacttcgccgaaagcgaaccggagataaagggtacgttcaatatcgaccgcccttgctcatggacaggcatcgaccatccggcagccaagattaacatgggcagcggtgtttattcattggatatcgaattgcccgctctgcaagccgatgactgggtactcgacttgggagacgtacgcgaaagtgcccgtgtccggatcaacggtcaggaagcgggctgcgcatgggcagtaccttatcagctacgagtaggtcatctgctgaaatcaggaaaaaaccacatcgagatagaagtcactaacctccctgccaaccggatagccgaactggacaggcagggagtgcagtggcgcaaatttaaagaaatcaatattgtcgatctgaattatcgtccggccaactatggtcactgggctcccatgccttcgggattaaatagcgaggtccggctgattccggtagattatttatctttcaagacacactaaagttattatttaaatctactttcagttcaagataaggcaatatagttcgggcctgactaaaaagtcagtagtatctccaattcccctccttcccgaaggaggagaatagagatagaaccgactttttagtcagcctcttttcagcctgttattttaatctatacctgttattttaatctataaatgaaatagtcaggctagttcttctatggctgtaaaaacctgcttttaaagtttacgtatttctgcgtccaaggacaatgcacaagacatttcaaacaggtactgcatccatatacatcaattatatcatctcttgagattgctgtattccaggtggtccctttcaatacttttctttcgcatatatccctacaaatgttacaattaccacacttcggggaaataggggcatacggtacagtttctaacggtgcatcagttaaaacagtaccaagacattgcgctgcaccatattcaggagtaataaacagattgtttttcccaatccatcctaatccactaagttgcgctactgttttgtgaggtaaaaccgactccttcgtttcaaaattaaacacaccttctgccaaaagtcccgcatcagattgtgaaagagctttataccctttgctgacaagaaattcagctaactcgtctgttacttctcccactctattttcagtttttacatactcatcttcaagaacaggtttataatcaggattattaaatacatcttttacaaacttcggatttattgcgattcctattaatatagcacatggcaaacctctattctgcttattggtcaacttggatatatctacgaaatgaacaaaacctacccttgactttttcaattcattctctacttctttattcatatttctttctttttgacagggatataaatatctgtgattagttccgaaaccggagttttttcgggtgtattgatataagtctcaaaagtaaatggttctcgcaagctataatcatttgcaggtagccaatcaagataaatataacgatataccctattcagttcatgatataatcctttaaaacgaaatatagcatattcacccgcaggaacttcataaacaccgaaccccttcggaattttaaatgattgtggtaatgttactccaaccataaaacgactttgttcttcaagcgtgataaaaggataatcaagagtcaggcttacatatttacatccttttgataataatccatagctttcagaaaattgtagcacctgtttccataaaacagaaaaactatggctgacatgatgtgttctctctaattttaaatatgcaatccgtgtatgaggcactctttcaatacttggttcaatctgtattggattcttgccttcagaacaggcatttgaatgtcttttacgaaattcaggtatagagcaattaaaatagtttttgaatgcccttgaaagagtatgtttattctgataattgatttgactaagaatttcggagacacttacattggtggatattaacttaaaagcaatgtactccaatcttaatcgttggatgtaattcccaaggctatcaccgcaaactgctttaaaaagtcggcggaaatgatacttggaaatgcatacaatttgggataacttttcagaatcaaggtcatcaaataaatgacaattgatatattcttgaactctgatcactaattcgtattgtatgtgagcggtattaattttttgcttccatcttttaatttcaggtaaccgtctggacataatttctctcaactccgacgaagtatggcgtatgccgacttctttatagtattcttcgggaaaaagtccccaaaggtagataagataatccattgagaagtcatacagtttaactccatttttcagacagtaatcacaatattcctcattttggtctgccttcagattggtataatcaatatccaaaggtattccgcaagtctggcaatattttgtttcagaattgatgttcataagttttttattattgagtgcaaagttaaccaatatgttatgcaaaaagttaccataaatagccttctttcgttttaatttgctttttattggttctgcatatctccccacgtaatttgaatgcgtttttgctctcatgctctaacaatttgtctgcatccctttattcatcgttgtttcaagtatggtagcaagtgtggtagcaggtatgagagcaaacgtttgctctcatacctgtcttgtgtctatgttgtcaattccatcctgattcttctcgtacaaactgcaatttccaattcaaaatcacggttgtttcagatagtttcaagcgcttggaactctagtttcaagcattgaaaccattagttccaagccttgaaacaaaagtttcagacgcttgaaactatctgaaactactgtcgattgggattacttgaccacacgatctgattgacttaaccgtatcaactgttccgattcacctgttctttcaagtagcactaaatcatctattgctcaataatacatcatttatcaggtattaatacctgatttctcaattattaatacctgagatgtcaatcgttaatagttgacaaatcaaccattaacatcctacaaatcaaaagatagcattgaacaaacacttactaacacgatttgacagagtgagagcaaccgcttgctctcatacttgccaccacgcctgctatcatagccaaaactacgatgaataaagggatacaagcaaattgttagagcgtgagagcaaaactgctattaaatcactgtggagaaaatccagaatcaacctattctcaaccatccgacttctctagttccaatcgtaattcttttaatgccttgatttccatagtattctgaacatatatgcgtgtcaacaccaaacgagtcataacacgacttgaacaaacatattcatcatctacgaactcatcaatgaggacatcaaggaaacagagagtacatttaagttcatgttttgatagtttatcaatgctttcaatttgtccaaagctaggccaattgtctttaagaaaggcaagtttgtcggtggagtcctgtaaatcaagcttcatcaggcaggggtaggaacaagtaggatcatccataattttctgttttttcatttgtgtgttcccgtatgccccaaagaaaaaaggcgcggaaactattactacattatcctctagaaggctctggtaagcccgtgctcgaataataagtaatagctccacgcccatgaggtatataacaaatttatatacaacagagacgtggagaccggttacttattatctgcaagcacaaaaatttaccagatttataaagtaggcatttgtactgaaaagaaaatccaagcaagtgataataaatatgctttgtatcagtggtttatgattgttttggggtttgcggttactttcattgatttcggtggtttggttcttgattggtgcatttttgtttctcgtttgtttctttgtttcggtttttattcgtagttttgtggcagaaataacgaataaaaagaatagctatggcacgagtaaggaagcctacgaaaattaaggagccgatcaaactgcggatgaaaccgttgagcgacggaaacaagagtttgtatttggatatatattacgacggtaaacggacgtatgagtatctcaagatgtatattatcccggagacggatagtaatgcccgccggcagaaccaaacgacaatggctgccgccaatgccatcaagtcgaaacgtatcatcgaactgaccagtggcaaagcaggaatccaaaccaaagagaaggtttttctgttggactggatgaatacgtataaggagtatcaggaaaaacatgacaagaaggacggccatcaaatcaaagtcaccatccgtatcttgcaggagtatgcaggagagcgaacgactctggatcagatcgacagaacattctgccagaattatctcgactacctgatgacggaatatcgccccacaggaaaacgcttgtcgaactttacgctccgcaattattaccgggtgctgaacagtgcgctgaatgctgccgtgcgtgcgaagctaatcagggctaatccgttcaacgagcttgaaaagtcggagaagatacggctgccggagagcaaacggtcgtatatgaccatcgaggaagtacgggcactgattgccaccccgatgaagaacgaggcggtgaagaatgcctacctgttctcctgcttctgcggactgcgcgtcagcgatattatcgggctgaagtggaaggatgtattcgtcgaccgagggcaataccgtttggcagtgtccatgcagaagaccaaagagccgatttatctgccgctgtcgccggaagcattgaaatggatgccggagcgtggggacaagacggcggaggatcatgtgttcgacctgccaagtcctacacacatgaatatgctgataaagccgtgggcgaaagaggcgggaatagacaagcggtttacatttcatacagcaaggcacacgtttgcgacgatgatgctgacgctcggcgcggatctctataccacctcgaagctgctcggccatgccgatgtgaaaatgacgcaggtatacgccaagatcattaatcagaagaaagacgaggcggtcaatctggtgaacgggttgttcgactgattccagcgaaaacgagtatcgtcttgtcgcgcttgtcgaggtacaggtgcagtattcggggtgcaggtgtagcctttgaggtgttttgcaggtgaagtttttgggtataggtgttgtctttgaggtgctttagggtgcaagtgcagtattcggggtacaggtgttgtcttcaaggtgcaaaattgccgctcgcgcgggcatatatattttagtttacttcggtatccatatatatagcaaaaaatctaaactaaaccgtttttgcgaaacaactgaaaagaaatcgaggtcggataggcggtcaaactcccgcttgaaaaaaggcattttccgttcacgacagatgtcggatgatggattgccaatacgcatctcgacttacataataagcatgcgcgaaatgcggtcgccgcaagctcgcctacttacccgaacggaaacgatcacaggcgaattcttttttggggaacaattcctttttcgggataacaatcaaaaggaaaaagtcgatagaggttcaacggaataacaataggccgtccgacagactaaatgttctcagtaccaagttttttcataagaaaacgcctcgcgatcttcggcattccaagaaaacaatgtatttttgcaaaaatttgtacgcatgaatataaaaacatgaactgatagtcaaaccggtatggaaacagggatagatatattattaaaaacactgctgtgcggagctatatgcaccttcttgttcggtggcgtattgttgtggatgcgacggcgggacagggacaggtcaaggatttatctggcagtctctttctttctgacagggatgatattcctcctgcggctgcttgcttcctatgccgggttgcctccggtgcctaccgtcctgcctattgtcaatctttacggcggggtgatagctttgctgattctttatttttatcccgtcgaagtgatcagtccgggatggctcacattccgcaaaggaatactcttattcgctccttgctggctgttagccctgttactggcagttgtgccttttcatttcagagttttgtattcctttggcgacctttgggagcacatcaccgaattcaatgtattgttccgtctggcgattctattcgtgtgcatcgttccctattgctttctgctgttttatatcccatacaactacaaaaggagcagtgctgactacaagtggattttcggctatacggcagctatgcagggcataggcgttttctatattcttttcatgctgaccggttctatggttgtaagcatgatacatgtcaccatttacaccctgttcggtttatttgtcgtctatcaggaattatactggcgtatccccgtgcctgagaccgagataaaggaaaaaataaaaccgcttcctgtggttaccgtaatgaaggacgaaaacggaaagaaagacggcaacacattgtacgacaagctggaagaactgatggaaacggaacggccgtggagaaatccagatttgagcatgggtgaactcgccatacagttagggacagacccggcaacacttctttccgtcatccggaagcgcggctatgaaaattacaaggattttatcaatcattatcggatagacggattcctgaaaatagtctatgaccggagaatggtaaacatccaagacgcctttttccaatccggattccgttcaaagtcaaccgctttgagatattttaaaaaatatacgggcacaacccccacagattatatgctgagagagagtataataccttctaatcttgacgagtaaagtagccaacatgggaattgagatacaattatatggttttatattgaacttaataggttggactttcctattctgctggctactgttatggcttcgtcgccgttccggtaatctgccgcgttactgcctcgctgccacctttttcattggatggctgcattttgcagaaaggctcattgctttctaccatacctccgtaccgggagtggaagtcctttccctttcgtatgtctacggtggcgtgctgggaattgtgaccgtgtatctctacccgatagccgtcatcaactcagagtggctcagcaggaaaaggggagcgatgctcgttgtcccctggatactggtcttcgtcctgctctttgccctgccgatggaattccgtccgttgcactcgttcgaagagctgatagatcacatccgtgaatttaacgtatggttccgcctactgcttacctgcgtgattcctgtctacgccttttttctgttttatgttccttataactggatgaagagcggcatcacctaccggtgggtttactattacaccctctggggcgtaaccatcagtttctgttatatgaccttcatccttaccggctcgctgacggctatctgcatacatcatacggtgtgccttcttttctgtcttgtaatgacttatcaggagttattcatacgcatagccgttcctacggaaaaaacggacgagccgtcccacatccccgacccctccctgccgacaggggatgcggcagccggaacaacggcctgccatcctttatgggttcagctcaacaaactgatgaagcaagaagagctttggcggaatcccgacatttctttggaagagctggctgcacggttaggaacgaaccgcaccaccctgacacaggttatccagcgggaaagcaaggagggatacaaggaattcatcaaccggtttcgcatggaagagtttgtgaaaattctaaacgccaaaccgcggctgaacattcaggaagaattcttcaaggtagggttccgttcaaaggcaacagccctccgccacttcaaggaatataccggtttcacgcccaccgattacctgcggagaatagcaggagaggactgattttcagcctattttgtagttttgaaacccgaagtgtcatttcgggtgagaaaaaatcatgcccttgtagttttgaaacctaaataattttggtttggaacttcatttacattcccattaattaattttacgacagcagcaaaaaagaaagacatggatttctttttatacttgttttcggtctttgcttttcgtttaccggccttgagaaaaacaatgtcgatgtaagggaagaagtaaatattgaatacaaagtgatacgagccgagataagaacagacttgtctgaatcatgctgaagcgagtttaggttgctgaaaaggaacattcggaagccggaaaggacgattcgtaaattgcgatgtcatggggagggaaacactctttggtataatataatgatgtatagtaagtagtgaaataaaaattaggaataaatgaaaagtgttattgaatatgcaaaaaatcacctttgttatttggcaaaatggataactttgccaatacatattcccgcgtggttgaagcaaaaacttgttcattacccatactttcgcacttcggctaacggctgttttgcgcatttttttatttctccgcttcctcttttctcccgtttctttatccggcaatccctgcttcccgtgaaatacgggacggtatcgaattgcccttctgtccatgaaataaaagtaagaaaccagatgatacaaactttacttgccttttcgggacgctgccgccatgcggttgtgtcccttgcgttgttgcttttgctgtcgcccaccggattaagggcgcagaccgggcatacagtttccgaaacggctgcacgtgattcggtcgttatgcgcacgacgttctatttctcgcccggcaacggcgagtggatcgagcggagcgactatccgaaatcggggcggttggtgcgctgggccgaggcgaaccccgatgcacggatcgtcatcacgggatgggcggatacgagcggaggggcggtgcagaacgacaccctctcgctgcgccgtgcccgcaccgtgcgccgctatcttgtaagaaagggtatcgccgccgaacggatcacttacgagggtgcgggcgtggatgccggagcggaaagccccgacaaagcccgccgcgcggatgtgtgcggtgtggtgcggatagcggtcgaagcgatgcccgctaccgaacaggtttcaccgcccgcagaaacgacgcccgcaggggaaacttccggcacgcccgtccgcaaggacgaaagcgacgacagggacgcaaccggaaccgccggaaaggacgtgcaaaccgcaattgcggtacaatccggaaagcagaccgaatcccaatcgcaaccggaacggcagacagccgcaaatgtgcaacggaaaacggcgcagtccgtacagccgaccgaccgccaacccgaaacacagccggagccgcccacggctgaagatattgtcccgtcaaaagcaactccgtcctccgggcgttacctcggcgtaaagaccaaccttgcggcttgggcgggaaccattctgaacgtcgccgtcgatgtcgaggtaggccgtcattggtcggtggagctgcccgtactgtggtgcccgtggcatgtgagcagcgagcacgccatcaagacctttaccgtgcagcccgaagcccgctattggctctcgaagcccggcgcggggcatttcttcggcgtacatgcccatgtgggttggttcaacgtgaagtggaaccgcgaccgctatcaggataccgaccgtccgctcttgggcgcaggcatcagctatggttatctgctgccgttcaacgagcattgggcaggcgagtttaccctcggcgcaggctatgccaacatgcgttacgataccttttataacatggacaacggcgcacgcatcgacacccgcaccaagaactattggggcatcacccgcgtgggcatttcggtggtctatcggttcaacctgaaaaaatgatctctatgaaacagaaataccatatcagtcttatcgccctcgtgctggcaatcgcctttacaggctgtgtgcatgactatcccgacggcgagggcatcgaccccacgctggtggaagtgaataccgaagtcacgctcgatctggaactcgtaccgttgcaaaccctcgccaataaagcccgcagcggaacaacggaagccgccgacggctaccgccgccgctttatcgtcgaggcgtggcgcgagggcaagcccatagcgcggcaggtgacggtcatggaacaagcggaggaaaacgccacggacatcacgctccccgtccggctgaaactgcacgccgtggaatacacccttgccgtgtggacggactacgtgagggcgggcacggacaccgacctctattatattacggaagacttgcagcaaatagtctgcaccgaaccctacacaggcaacaacgactatcgggattgcctctacggaaccacaccgctcgacctgcggcaataccgtgacgagtggaatgcaaaggtgcaggtgaaagtggacatggtgcgcccgctggcgaaatacgagctgatcgccaccgatgtgcagaaattccttgaaaagacacagcggcagcgtgccgggggaactgcgtacaccatcaccgtccgttacggcttctacttcccgctgggcttcaacgtgctgaccggaaaacccgaacgctcggaaatgggcgtggcgtttaccgctccgcttgtcgtcacggacaacggcagcggggagtgtacgctcgcatcggactacatcttcgtgaacggcgaggaatcgtatgttccgctgagcatcgaaatcaaggacgacgcaggtggcggcatcagccgcaccacgggcatcgacgtgccttaccgccggggacacctcaccaccgtccgggggcacttcctcaccaaccgctacgacacgggcatcggcatcgatcccggtttcgatgacgacgatataaacatagacctcgacggtctgctacaataataaaacgagtgaaataccaataaattaaaaatcaaaattaccaagcacatgaaaaagtatcatctttacctctggatcatcgccctcgtggggctgatgaccgcgtgcagccaggacgaagccgccgggccgcagaacgacgcaagcaaccgcgtgcgcatcggcacgagcatcgatcaggcgttgcagacacgcgccggatcggtcaccattcccgccaaccataaactgcgctacgtgctcgaagtgtggaacacgcagaccgatgccgcctgcatctaccgcaatgaaatgctcaccgagggagccgacgccgttgcgttcaagttcatcctgacggaagccggaaactacaaggcactgctgtgggcggatttcgtgccggatagtgaaacgggcactcaggttaacacccccaacacctacacccactatgcggatcatcattacctgaccaacgacgccaaggggctgaaagccgtcacactggcaaatccggacacgcaatataggataagcgacgacacccgcgacgcattcttcgcctgcatccccatcgaaaagaaaacgggtgctttcgaggagaacgtagagctgaagcgtccgttcggacaaatcaacgtcatcgagaaaaacactgacctgctcgctaaggtgaaatccctgacgatcaaaatcgacgtcccctatcaattcgatgtcgaaacaggcacaccatcgggcaagacaaacataatctctaaggtaagcaccttgcccaccgccactgccgaccgcaaagccaacctgttctacgactatatcttcgccccggccacgggtcagaccacgctggacgaaatcgggatggaattcgagagcagcgacgcccatgtctcgctgccggagtataagattcccgccaacatgcctgccgtgcgcaacaagcgcaccaacatcagcggctctatcctgcaagcgaacagcaacgacgccaagctgaccgtatcggtgagcgacgggtggacggagccggacgaaaagcaggatgtggacgttcctgccgccagaaccctgctggacaaatgcaagacctccggatcgggcgacgatgccaagaactacacctataccatcaccaccgccgcacaactgacggcgttgtccacgctcgcgcaagccaaagcggtgataacggactgcacggaagcccaatatcgtctggccaactacgtgctcgacgccgacatcgacctcgaaaacaaaccgtggacgccgatatataatttttgggggaattttgacggacgaggccacgccatccgcaatatgaatgtttcaatccaatccaccacaagctatgaagtgaatgccggattgttcgaaacaatcggaagtaaggtcagcaaccttatcgtggaggggaaggtcgagctaagcggaacagggcattgctctgccggaggtatatgcggccttgtgtctggaactatcgaattctgccgttttaacggcaccgtttcttccaccacctcgaacaacaacacgtataactctgccggagggattacgggaactactgccggaactaacccagctatcaccggctgcatcgccaatgcaaaggcaacgattagcggcggagattccaacgaatccagagcaggcggtctggcaggcagaataaatggaactaaatgcacctactcggcatggaacagcgattccaacaacggagggactgccgatatgataggcaagaacacacacgacagcggcaacacgggcacgggcaacaacagctttaccagcatctccgcactgaacggcctgctctccgccatcaacagcggtgcgtccggcagcacgtacacttggaaagccggaactcagaataccgattatccggtactcgagccacgcaagtaatgacgcacggggacggggtaaacgggtcattttgcctgtccccgcatcccgtgcccatcgcataaaccccgccggaaccattcatcggcaaacagctattcggacagccatgcgtcaatgtccgggtgtcataacggcacttccccgcctcgcagcggggaatagcacataaaacaactcggaaaatttatccatgaaaacaaaacaaataggatcaatgaactctccgctgccgctacgattgaagatagcctccggctatcttctgctgatcgtgctgctgggtgtgatcgtatttgttgtaagaaaatacggtttagttcattataattaaagtataaaccataaacaagtaattcgaatggaaagacagaacaaaaaattgtctctttttttaaggggagactgcatttacaccatttcgctacagaacaggacgtagcggaagagttttacacattactctcgaaagcgagaaaactttatcttcaggatgttatagtggacggcaaacggtatgaccgttacgtggatgacttcgtcaacagccaccgatacatagactgcgacaaggcagtatgccggaattgccacgaaatgaacatccacatcgtcaaggggctgctgaccgaatgcgccgaccttgtcaaacctctttttacagtagacccgttctcgccggagaagtgcatggagctaaaacggatgtacgatacgtccgaaccgttgccggcgaccgacaggcatcgtgtcgaggaaccgataaaagatcctccactctctttcggctgcaacctcagtcgtgaacagatggtaggtattgtgtcttgtgccaatacttaccatctgttttttaatcctatacatatcgaagacatggaagctctctttgcctgcaaggagggctttcgcatccgggtaaacaacctgcgccatgtagtcatcctgttcgatgcactgctggaaaactcgttcatccaatcccgctggcagtccgtgctcgacaaagggcatttcctattgtctaaagacggcaagaggtatgtgaccgcttcaagcctgtctaccgccttgtctgcggcgaggattcacatgacgtcaatctcctacgggataagaaaagctatcaagaaactgaaagagtgatataaactgctttctcaaagcagaataacatgaatatgcaaacgcacaacgtctggtcaatccggacgttgtgcgtttgtcaaagaaatccaccgataaggactgccggaggtagcattggaatagtcgtcggttaagataatcagagcaaacggtaataggagcctgaagatcgggttcaggaattgaaaaggtcgtccatctttacctcgctgtgaacaatgcttttatgcttgccgttgactacaccgtatgtcgtaacaaatgtaattacaagtgctttcttgttctttgtagccaagcggaacagccccgtgcgttcccgaagtttcatctcgtagctgtcggtgatgccgtacaggtctgtgctgaatttcatttcgcacaggtgaatgatgcggtcggcacgttcgatgatcaagtcgatctgaaatcccggagttccactttcggaatcggccttgcttctccatgtggatacggacgtaccgactcccgcaattcccaacgcggttttaatctgcctgtgatggctcaaacatacaagttcaaaactaagtcccatccacgccgaaacactgcgtgagtcgatattattgctccaccatctttcatctttcgtattgtttggctcgatgaatttgtaataaaaaagcgtgaaaaagtctgtcagtctgaacaggctgttgcgggttttgttgccatactgtgacagccgcgaaataaagtcgcagcgttcgaggtttttcagaatcttactcaaaaaagcaccctcgatgccggttgcacgcagtatgtcttcacgcgtcattcccgatttgttttccgacaacagcttgactacggaaacataagaatccgcttgggcgaacaaggcgttgtagagttcgtcgaattcgcctttcagttgagcaccctcggcgaaaaacaaccggtcgatattttgtgcgaggctgtcggcaggattcaaaaggctcagataaaaaggcacaccgccaaatatcatatgacattgcaagagctggtatctatcccattgacaatcacgttgccgcaaatattcttccgtttcgcgcaggttgaatggggacaggtggaggttgcaggtgacccgggcgtgtaagcctccctggttgccctcaatcttgtcggccatccaagacgttgccgagccagtggctataagcatgatgtcggtgcgtctgttgccccaaccgttccaaaaattttccaatgcactgacaaaattagaacgctgggtgtccatccaaggcatctcgtcgatgaatatgacttttttacgattggaaggcaatgattccagatagtcctcaagcgcattgaaagcatcgtaccaagtggcggctttcggctgctgtttctttgagtgccgatgaattgccctcatgaaattttgtatctgtacagttgcgggggtcttgtgctcaccgacaaacgtaaagtcatatttatagttgaagaatttgtcaatgagataggtcttgccgatacggcggcgaccgcttatgattacaaattcagaacggtccgattctaaacaccgttgcaattcgtcacattctcttttccgggaaaccagtttgtcctgcatacaaatatcgtttttgcaaagatagtcgatccagataggaagaccaaattttatcgaatgagattttaccttatcttgaaaaatatcatgaataaggtaaaatctcatgggtagcccattgatttaagacactactttattagtgcattttaattggtaaaagtagtatctcgctgcattgaatgtattgtctcaactttagactgtatctgatagccggacatttgcaatggatctatgaatggagagaatctcattgaatggagttgtgtctctccaaaatcgcaaacaaggattgtataactggaggcgttaagtctccgttccggtgcaagtgctttgccgttcacgaaaaacaagcgggcttgcccggtgtccacgaaatttctttcgggggagcctaataccccgaccgacattcgtcggtgggagcgatgtccatgcaagcagcaagctgagacacgggggattgtccgaaacaacaacgaaaacagtatggcaaatgcgaaacggtatttgaagttcaggcgcatttttaggcaatttaaggtatcctgtctccgtgtttgtgaaagggacagcctaatgtgttttctttcggctgtaagccttacaaatctattttggttgtagttaatactctctttattttgtcgaggttgagccactgagagtatggagccatcttccttgtgccgaattggcttaccagcttccgaaaaatatctttcgtctgccgcttgataacctatatttgaacgtgtccgggaagcaggtaggttttgtgcctcataaaaccacctgacaataccggaagagcagccaatactacgtcaggaagctattgacgtgaagccccgaaaaaactgtttagtttagtgcttagcttatatataggctaaaagaaagtaaattaaatacaggcaagcagaattttgtctgcctgtatgctcttatttctttcaggaacggttgacagcaacctcaatgccctgcatgaataaaacgggcaggcttacaaatgtgaaacatagtataaaataagattgcagcgaaaagagaaagtagaattgtcttcccttttggctgcacagttagaatgggaagatgcggcgaactggctcgaaattccagtttagtttcgtctattagcctatatatatgctaaactaaattaaactgaatataggcaaatatatttgtctgcctatgtgccgatgtctttatagaattgactacctttgtgacgtgatgaaaatcgactttgccctttctcttttggctgcaactatttgtcgatgcgaggccggaacgtagtattccaaagaaggaatatgaatagcgtaaaattgcttggaaaaatattccgagtacaagcaaatgaaaggaaagaaacagaatgcaagcaaaaaaaatgagaaacgatttaattcgcatttttgtttctcatttgtttcttaatcaaaaccacacaacttgtaattcgctaattatcaaccgtttaatggttggctatgaaaaatttaccagattttctagagcagataataaaaacgctatctccaaaataaaaaagcgtagctcctttgcggagatacgctacaaatatagttatattttctgatattgatactttggtgtgtactatttcgccatctgattcagacgaaataccgccatatcgctgtttgttccgtttcaataatcagatcgataaacatataacaagttaagaagagaaaagagttacagagtctgaatagtctaatttattcttttagtaattcatcaacagatttgatgaacaattcagcttgtggaaacaactcgtcaaccatctccttatcacaaaacataaaatcatcataatctccactatgtcttttctcaaaaagcgtagtaaatgttttacctattcttagaggaagctttccggtagatacaaaatgcagtcctaacatcgttttaaccccattgtgagtttgcgtttgaatattattctttagcaataatgctaccgtcgcataatagcatgcgtaatacattcggttaatagcagcattatagaaagtttcccgaatcatcacctccgcttccttcattgtatcataagcacgttgcattctgtaggcgatcaatgcttttcggctctcttcgtctaaaatatctttcataatacgattccttcattagtgacattaatataaaaaggtgttttgaacggacggttttcccaaagttttttcagcataaccatcggactgatagatataccggttttcagttcaagttcgtaaaggggtaaagtaatcgcctcttcctctttcaaagttattttctctccatcaagcaagatgagtaaatcaatatcactgtcactgcgtgcctcattcctcgcttgagaaccatataatatggtcttagcggtaggagcaacatgacggataatatccttgatttgttcgatcacttctgttcgtctcataacttcttaatctattgattatatgcaaatatactcgattcttttcaattctcaacacacccaagaacgctttttattatattctcactatttcgccatctgattcagacgaaataccgccatatcgctatttgttcctattctgaaaggaggcccccaaagagataatccgctggaaacatagatatgtgattggctccatttgcgatagccgtgactctgttcatatatcctgtctgttacccaacttataggccatatctgtccatgatgcgtatgtccgctgaattgcaggtctattcccaaagaatctgttttagccaggttgtagggttgatgatctaaaagaatgataggtttactacgatccgcttgctttaataaggtaggcagggaatgacgagaacggttggaacggtcgtcacgtccgatgatctgcacaccgttaggcaatgttactacggaatcacgcaatagttgtatgggagtatctttcaagaagcggacgctttcatcaataccgctgatgtattcatgattgcccggaaccatataaatgcccaagggagctttcagctgtgccagttcttccgccatattctccttatataatggggtaagactattatctatcaaatctccaccgataagtataaggtcgggatgctgcgcatttatcatatctacatattctttcagcatggcttttcccgtgccataccctaaatggacgtcactcacggctacgatattgattccgttaccttctatcggcttatcaagggagacatcaatcttattgacctgcggatgacggtagttataataaccgtacagaagcagacagcaagtcgctcccagcgcataatagaaaccgtgatttagtgacggcacaaatatcttcgtcacatccgctatcaacaaagcaaaaatcatgtacagtgtaaagaccagccataccgaaccgatgtgaaacatagatttcgacaggatgacaggcatatctatatgacgagtcagcatagctatcaccaacgagaaagctaccagccaatagatgacagacaacagaatcttcatagccagcgagaagccggaaagcatctgtaatgtacggataaagatataaacattgccacctacataagcaagcagaaatatcaggaaaaatattcgcataatcgttataaattaaaatggttatcaaatatattatcgcccttttccgttgtcaggtagtgagtgtctgtatatctttgtgaagaataaaaaacaggtattatgttaccggatttgtgtaaagtattcgacaatacttctacctattgttgacagcttgttccaattgcctcaaagccttctccagcgtagcacgcggacaggcaacattcaaccgcataaatccttcaccttctttgccgaacgtcgttccttcattcaaagccaagtgggcatcttctacaaacaggcgattcagttcctcctgatttaaccccagctcacgacagtctaaaaagataaggtaggatgcttgcggacgaatcattctgatggcaggaatccgctctttcagataactttccgtgaagtcaatatttcctttgatataggcaacgacctgatccagccattcagtgccatgactgtaggctgccgctacgctgagataagcgaataagtgtccttcggagaactcgctcgcttccatatatacctggaactgatgacgaagttcgtcattctcaatgattgcatacgaacttgccagtccgggcatattgaacgctttgctcggagacataaagacaagggagttcatccgtgctttctcagaaatcaaagcaaaagtaggatgcttgtaaggaggcagggtcaagtcggcatgaatctcgtcagagattactaatgtaccgttctcatagcagatgtcagcgatctgcgacagttcttctttggtccatacacgtccgcccggattatggggattgctcagaataagcagcttgcatccctgcacatctttgcggaaacggtcgaaatcaatatgatattgtccgtctttcaataccagcggactgtaaaccacttcacgttcgttcttctgcgtcacgagaaagaaaggatggtagacaggaggcatgaccatcaccttatcccctttctccgtaaaacaatggatagcaaatgctagtccgcgaacaatgccgggagtaaacgtcagcatatcctcatgaatttcccaaccatgccgttctttaagccagttgattatggattcggcccattccttgcaggcaaatgtatagcccagcacttcatgttccagacgtttcttcaaggcgtcgattacaaaaggggctgtgcggaaatccatatcagccacccacatcggaatcaagtcattacgcccccaacgacgttctacggcatcccattttacggagtccgtaccgttacggtttattatttcatcaaaattatagttcatactgcatgaggtttttatgttatgtgagacaaaagtagtacatttgtactcaattcaaaaaggaatttatgacgaaagctttattttttgatatagacggaacgctggttagtttcgaaacacaccgtatcccgtcttctaccattgaggcattggaagccgcccatgcaaaagggcttaaaatatttatcgctaccggacgcccgaaagccattatcaacaatctttccgaattgcaggaccggaacctgatcgatggatatataaccatgaacggagcctattgttttgtcggagaagaagtaatttataaaagtgccatcccgcaggaagaagtaaaagcaatggccgctttctgcgaaaaaaaaggagtcccctgcatcttcgtagaggagcataatatctctgtttgccaaccgaatgagatggtgaagaagatcttttatgacttcctgcatgtaaatgtcattccgacagtttcatttgaagaagcaagcaataaggaagtcatccagatgactcccttcatcacggaggaagaagaaaaagaagtgcttccatccatcccgacttgcgaaataggccgctggtatccggcttttgcggatgtcacagccaaaggcgataccaaacagaaaggcatcgatgaaatcatccggcattttggcatcaagctggaagaaacgatgtccttcggcgacggaggaaacgatatcagcatgctccgccacgcagctatcggagtcgctatggggcaggccaaagaggatgtaaaagccgcagccgactatgtgacagctcccattgatgaggacggcatcagcaaggcaatgaaacatttcgggattatctaatttatttatccggtcagcacatctgtttatccgtcactaactttatgagcgtagacactaataacgcagcttttcaggacgccctgaatcttattcagtatacccgccagtcggtttttctgaccggaaaggcaggtacaggtaaatctacattcctacgttatgtctgcgaacataccaagaagaaacatgtcgtactcgcacctaccggcattgccgccatcaacgccggaggaagtacgatgcacagtttcttcaaactccccttctatccgttactgccggacgatccgaatttaagtcttcagagaggacgcattcacgagttcttcaagtacaccaaaccgcaccggaaattactggaacagattgaactggtcatcatagacgaaatctctatggtacgggcggacctcattgacgccatcgaccgcatcttacgtgtatattcacataatttacgggaacctttcggcggcaaacaactgttattggtaggcgacgttttccagctggaacctgtcgtgaagaatgacgagcgggagattctgaaccgtgcctaccctactccatacttcttctcggcaagagtattcagccagatcgatctggtatccatcgaactccagaaagtataccggcaaactgactccgtctttgtcagcgttctcgaccatatccgtaccaacaccgccggagcagccgacctgcaactgctgaacacccgatacggaagccatatcgaagaatcggaagccgatatgtacatcacgcttgccacccgaagggatacggttgactcgatcaatgagaagaaactggccgagctggcaggagaaccgatcacctttgagggaagcattgaaggggattttcccgaaagtagtctgccgacctcacaggaactcgttctgaaaccgggtgctcaaatcatctttatcaagaatgatttcgaccgccggtgggtaaacggtaccatcggagtgattgccggtatcgacgaggaagaagaaacgatatacgtcatcaccgatgacggcaaggaatgcgatgtaaaacgggaatcatggcgtaacatccgctatcgctacaacgaaaagacgaaagagattgaagaggaagtactgggcagcttcacccaatatcccattcggctggcttgggccattaccgtccacaagagtcaggggttgactttcagcagagtagtgattgacttcacgggaggtgtatttgccggcggacaggcgtatgtagcactcagccgttgtacctcactggatggcatccagctcaaaaagccgatcaaccgggcggatatctttgtgcgtcccgaaatcgtaaactttgccggacggttcaacgaccggcaagccatcgacaaggctctgaaacaggcgcaggccgatgtccagtatgccgctgccgcacgtgcattcgacaaaggggatatggaagaatgcctggaacaatttttccgtgccattcactcccgttatgacatagagaaacctgttccccgccgattaatccgccggaaactggggattatcaacaccttgcaggagcagaacaaaaagctcaaagagcaaatgcgggaacagcaggaacgtctgcggcaatatgcccacgaatatctgttaatgggaaatgaatgtatcacccaagcccacgacgcccgtgccgccatcgccaattatgacaaagcgctcagcctcgaccctaattatatagacgcctggatacggaaaggaatcaccctgttcaacagcaaagagtattttgatgcagaaaactgtttcaataccgctgtcagccttcatcctgcaaactttaaagctgtgtacaaccgtggaaaactgcgtctgaaaatcgataatactgaaggagcaattgccgacctggacaaggctacaagtctgaaacccgagcatgccggtgcacacgagcttttcggagatgccctgttgagagtggggaaagaagtggaagccgccatacaatggagaattgccgaggaactcagaaagaaaaaatcataaataagttggtagtgtatcagaagtcttctgattgtgaaagttattgaatatcatcttacatcaaaaactttttattaactttgccttcgtatgtacgtcaaactcttaaaagaaaagcaaatgaaaaaaggtttgaaaatcgcagctatcgtcgtaggggtaataatcattctgatgctcctccttcctttcgccttccaaggtaagatagcaggtattgtaaaaacagaaggcaacaagatgctcaatgcacaatttgatttcaagaaactcaacattagcctgttccgcaactttccgcaggcttctgtcactctcgaagatttctggctgaaaggcgcgggagaattcgcaaatgatacccttgtacaagccggagaggtaactgccaccatcaatctgttctcccttttcggagacagcggttatgacatctccaaagtattcatagaagatacccgcctgcacgccattgtcctgccggacggtcgtgccaactgggatattatgaagcccgacacgacagacacgcaggaaacgcctgccgcggaagaagattcatctcctttcaaagtcaagctgcaacgttttgtcatcaagaacatgaatttgatttatgacgaccagcaaggtaaaatgtatgccgacatccgtgatttcaacgccctttgtgccggtgacctgggcagtgaccgcactacgctgaaactggaagcggaaaccaaatcactgacttacaagatgaatggcattcctttccttgcaaacgccaacatctccgccaagatggatgtagacgccgatcttgccaacaacaagtatacactgaaagacaataccattcgcctcaacgccattcaggcaggtatcgacggttgggtggaactgaaagatcccgctatcgacatggatctcaaactcaataccaatgatgtaggcttcaaggaaatactgtctttgattcctgccatttacgcaacggaattctccagtctgaaaacagacggaaccgctactcttgccgcatcagccaaaggtacgctgcaaggagatactgtccccgcattcaacatcgacatgcaagtcaagaacgctatgttccgctatccggcattgcccgcaggagtcgatcagatcaacattaatgccaacgtccgaaatccgggaggaaatatagacctgaccaccatccaaatcaacccgttcagtttccgtctggcaggaaatcctttcagtctgactgcggacgtgaaaacaccggtcagcgaccccgatttcaaagctgaggcaaaaggtaccctcgacctgggtatgatcaaacaggtataccctttgggagatatggaactgaacggaaccatcaacgccgatatgcaaatgtccggacgtctttcttatatagagaaagaacagtacgacaacatgaaagcctccggaaccatcggtctgaccaatatgaaactgaaaatgcaggatatgccggatgtggatatcaagaaatcactcttcaccttcaccccgaaatatctgcaactgagcgaaacgacggtcaatatcggtaagaacgatattactgccgacagccgtttcgagaactatatcggctacgctctgaaaggtactacgctgaaaggaacgctgaacatccattccaattatttcaatctgaatgatttcatgacagcctccacagacagcgtggcaactaccgaggctgctgctacagactccacggcgattgccggcgtaatagaagttccgcgcaatatcgacttccagatggacgccaatctgaaacaggtgctgtttgacaagatgacattcaacaatatgaacggtaaacttattgtcaaagacggaaaggtagatatgaagaatctttctatgggcactatgagcggcaatgtggtgatgaacggatattactctaccgccaatgcgaagaaaccggaaatgaaagccggattcaaactgtcggatatcagcttctcacaagcatacaaagaactggatatggttcagcaactggctcctatctttgagaacctgaaaggaaacttctccggcagcatcaatgtgctgaccgacctggacgcagccatgagcccggtactggaaacgatgcaaggagacggcagcttgtctacccgcgatctcagtctgagtggtgtgaaagcaatcgaccagatagccgatgccatcagccaaccgagtctgaaagaaatgaaagtgaaagatatgacactggacttcactatcaaagacggacgggtggaaaccaaaccgtttgatatcaaaatgggtgactataatctgaatctttccggtagcacaggactcgaccagaccatcgactactccggcaagatcaagcttccggcatccaccggcatttccaagctgatgacactcgatctgaagatcggcggttcattcacttccccgaaagtcagtgtcgatacaaagagtatggccaatcaggcacttgaatccgtagccgacgaagcaatcagcaaactgggagaaaagctcggactggattctgccacgactgccaacaaagattccatcaaacagaaagtgacggaaaaagctacagagaaagcacttgatttcttaaagaagaaacttaaataagaaaaggagaagagagtatgcttctgaaactgtacgataaaaacaataacccgcaggacttgcaacgggtaaccgacatcctgaacgacggcggactgattatctatcctacggatacgatgtacgccatcggatgccacgggctgaaagaacgtgctatcgaacggatttgccggatcaaggatattgatccgcgcaaaaacaacctgtctatcatctgctacgatctaagcagtatcagcgagtatgccaaagtgggtaataatgagttcaagctcatgaagcataatctccccggcccgttcacgtttatcctgaatggtaccaaccggctgcccaaaatcttccgtaaccgaaaagaggtgggtatccgtatgccggacaacaacatcatccgtgaaatcgcccgcttactggatgctcctattatgaccaccacactgccatacgatgagcatgaagatctggaatatatgaccgatcccgaactgattgacgaaaagttcggtgatattgtggatctggtaattgacggaggaataggaggcatagaaccttctacagtagtgaagtgcacagaagatgaaccggaaattgtccgtcagggaaaaggctggctggaagggatttaattccgaagactgttaacttagagaatatataaatcaggcacggatttcgcggattgcacggttttaagagattgagtatctaaaaaaaccgcgttcatccgtgtaatccgtgcctgaatatttcttacttgatcaatgattccggatccagatgacctgcttcgatatccttgaagtaacggtaagtacctactttcaactcttccgtagcagcatcgtcacaaacgataatacccttttcgtgcatctgcaaagcactgatagtccacatctgagtgatagaaccttctactgcatgatacaatgcgcgagctttattgtgaccatttacgataatcatcacttctttggcagaaagcacagtgccgacaccaacagtcagagctgtcttcggaactttgttaatatcgttgtcaaagaaacgggagttcgcaatgattgtatccgtagtcagcgttttctgacgggtacgggaagtcagtgaagaacccggttcgttgaatgcaatgtgtccgtctggaccaatgccacccatgaaaaggtcgatgccaccataagacttaatcttttcctcgtaacgtgcacactctgcatccaggtcgggagcattaccgttcaggatattcgtattttcctttttgatatcgatatggctgaagaagttattccacataaaagagtaatagctttccggatgttctttcggcaagcctacatattcatccatattgaatgttacgacgttctggaaagaaacgattcctttcttatttaaatcgatcaaagctttatacatacccagaggtgaagatcccgtaggacagcccaatacaaaaggtttttccggagttgggttggcagcttttatttttgcggcaacgtaatgtgcagcccactgagatacggactgatagtccggctgaataataagtctcataagtcgattgttttataggttagtaaataattgttcattctttatttagcggtcttttttcaagcggtccgccatcgcacgtgccaggttctcacactgggtataggtaatatcctgcatcgcctgtttcatctctaccggatcgcctaccagctcgaacttactcttttccgcaaattcagccatacgcttcacagcagctcctgcccaggtgaaggaaccgaagtatcccaagtaacgtcctttgagttcgcgaaccagaatcttagacaataacgattccacttccgggaatatctgattactgtatgtcggagaaccgacaatcaatcctttataacggaaaatatctgcaaggatataagaaggatgactcttcgtcacattgtgcatcacaatattcctgattccctgtgctgagagttccgcagcaatagcttccgccatctgttccgtatttccatacatactgccatatacgataaccacaccttcgtccgcatcataacggctcagacggtcatagataccgatcaccctggaaatattctctgtccataccggtccgtgtgtagagcaaatggtagtgatgggcagtcctcccaacttttgcagggctttctgtaccggactaccgtatttgccaacgatattggagtagtaacgcaccatttcaccccagtacttatctacattgatacgggtatccaaaaatcctccgtctacagtgccaaagcatccgaatccgtcaccggagaaaaggattccgtccgtttcatcaaatgtcatcatcgtttcgggccagtgcaccatcggagtcatatagaaacgaagcatatgcttgcctaatgcaaggaagtctccgtctttcaccagatattgctcgccggtaacaccgtagaatccttcaatcataccgaaggtttgcttattgccgacaataataatatccggatagtgttgtttaatcaatcggatggagcccgaatgatccggctccatgtgatttataatcaaatagttaataggacgttcgccgattacttgcttgatcttgcgcaagtagacttcaaaataacagatatctacagtatccaccaacgccaccatttcatcatcaatcaaataagagttatacgaaactccatagggcaacggccataacgcctcaaaacggtgtttattacggtcatttacccccacatagtggacatttcctttaattcttgttttctgttccattcttcaactttaattaatttctgctcaccagctatgatcctctgaggacagagatttattctgtggtgaagttatcttccgcaaaaataactcttttttctgaatccctgtacttcttaccttgataagctcccctttctttcattcttttttgcaaacgagttacaaattcataattcttcagtccccagtccggagcaatcagtagttccttgggagactgcgaaacaaaacgttccagtaccagatccggacggagatgctctacatagtcaatcaccaggtcaatatattcgtccacttccgtaaacagatgaaaaccttccggattctcttcgtattcatgcgccatgcgagtaccacgaatcaactgtaactgatgaattttgagtgtggacaaaggaagcgcggaaaggattcctgcctgctctaccattgtatcatgtgtctctctcggaagaccgaggatgacgtgcccgcccgtcagtatgccacaggcggcggtacgctgaacagcctctaccgtatccgcatacgtatgtccgcgattgatacgccgcaatgtctcatcactggcactctcaatgccatattccaccatcaggaatgtatggcggttcagttcttccagatactgaagcagttcttccggcatacaatccggacgcgtaccgatcaccaatcctactactccgtctacctgcaacgcctcttcatatttacgtttcagtccttccagttctgcataagtattggtatatgcctggaagtacgccagatatttcatctccggatatttatgggcaaagaaacatttcccctcctccagttgggtagcaatcgacttttccgtccggcaatagtccgggttgaaagtctggttattgcaatacgtacaaccgccccatcccttcgtcccatcccgattgggacaagtaaaaccggcatttaatgatattttctgcactttgtaaggaaaatgttttcgcagaaaggttgggaaatcattatattgtatttgataagacatatctatttaattcatttgttatttgtgtggcaaacataagaaaaaacagcgagttacggaaagatgccccaaaatatcttcaatatattaaaaaaaacataaagtgcataagataaattaatatttattgcgaaagcagaaactatttagttagttttgtgtgattttaagcattgacgggaggatacttgtgaaagtcttgtgcaattattccccaattatgatttcatctcaccataccccatgcgactctcgtcaataaactatcctctttatgttctaaaaacagaatataaagaggatttttagcataagcaggcagacaagacagcgaaagggaggaaaaaataggcaaactttcgtattatccgttcaatgtagcgtccgggcttcttgttttccattcttttacttatttttgttctaacaaaaaacaccgatattatgaaacgcgcctggctccttcttatttctctttttaacttttgcatattagtggcccagcctacctatcagatcaagcattattccgtcaatgacggaatgtcacaaggaatagtacagacaatcatacaagacaaaaaaggattcctatggttcggcacctggaacgggctgaataaattcgacggatatacattcaaaaactataagacatcttacaaagacggctatattctgaataccaaccggatcagtcagatagcggaaacgaaatatggggatatctggtgccaagcctatgacggacgggtgtatatgttcgacaatcagacagagaagttcatcgacattttaggttcagtagcagaaacgatgataacgaataattatgccgaccatatttataccctttccaaaggaatctcatggatcacctttcaaaacgaatgtgccgccatccgcatagatgaccaactttgcaaacaggggaaaggaatcactctgtacagttccttcaaacaaaacttgaagggagacaagatatataccgttttcgaagattccgaaggagatgaatggatactgaccaacaaaggaatctcgatcataggaaagaagcaggtagacagcgatttcccgttccaatacattaaagaagcggatggaattatttatctggtttcccaatcggacaaattggcctcttacaactttaagaccagacaattcaaattcatagagattccttatcatgtttcgatgattaacgaagtcaagaagtttgactccaatacacttttgctggctacagacaacggactgattatttataagataaaagaaaaagaattccagttaattgatatacgcacatcaacgcaaccttccagcgtcgtacagtcagtttatcaagaccattacaaggaactatggatattcccccaaacgacaggagtgatccgttataatccatccaccgaggaaatgcagcatttgttcacaccggccgacgaagtgatcagatatgaacggaaaaataagaatgtgatctttgaagaccggcaacacacgttatgggttctccccccggaagggaatctgtcttattatgaccgtgaaaacaaagaactgaaacccatgctgaaggacagcaacaatccgaagtctgttttcagtccgctcgtccgcttttacacactggacaatcagggcaactgctggctgaccagtacacgtggcatttacaaattgtccttctttccacatacctataatctggtgcatattgacaatggattcgagacccgcgcttttttatgcgacaatgaaaagaggctgtgggtttcttcgaaggcacagatgatcagagtgtaccaaccggacggacagttggaaggctatctgacgccacaaggaaaaataagcaaagataaacagagttttacaagcgtatattgctttcttgaagaccatgaaggcaatatctggataggaacaaaggaaaacggcatttatctgttaaagaaaaagtcgccggattcctattccgtacaacaattcactcatcaaccgaatatgccatacagcttgagtggcaacagtgtatattccatttttcaagatagccataaacgtatctggataggctgctatggcggaggaatcaatttgctaacctacaataaggacggtaagacagaatttatacacagcgataatgagttgaagaattacccgaccggctacgcttcgaaagtccgccacatatccgaagcgccgggcggtgtgctgttaataggaaccaccaacggattactgactttctccaatcaatttgagagaccggaagaaatcaagttttatcgtaattgttgcgagtcaggaataagtaccagcctgagcggaaatgatgtgatgcatacatacaccgacaagcaaaaacgaacctatatagccagctttacgggaggcatcagccaaatcgtatccaagaacctgctcagcaacaagattgagttcaagacatatacaacggatgacggactggcttcggacttggtacaagccatgcaggaagatcaacaaggcaacttatggattctttcggaaaatgccatttctaaattcgacgctcaaagaaagactttcgagaattacgggcttaactctctgcaccaggaatttagcttctcagaagcggcaccggtgatcaacgctcgaaatcaaatcgtattcggtacagacaagggattcattgagatttcttccaaagagatgcagaaaagttcctatgtccctcccattgtctttaccggtttgaaagtgcagggacaatcttctgtcatcgccattgacgatctggaagaattacgcctcaccccctctcagcgtaatgttactttccagtttgcggcactcgattatgtcgattccaaagaaatccgttacgcataccgactgaaaggactggaagaagagtggcacgacggggacaagaaccgttctgccagctacatcaacttgccgaacggcaaatataaactgcaaatcaaatccaccaacagcgacggcgtatggatggacaatattcgcactttatccatcaacgtactgcccactttctgggagacgggctgggcatggctgctctacgttattctcttcgttctctttacgggcagtatcgtatatgtacttttttatatttatcggttgcgccaccaagtggatatcgagcaacaactatccaatatcaagctccgtttctttactgacatatctcatgaactccggacaccgctgactctgatcagcagcccggtcaatgaagttctggaaaatgaagacttatccgccacagcccgtgagcacttgactgtggtacaaaagaatgccgaacgtatgctacgtctcatgaatcagattctggacttccgtaagatacagaatcagaagatgaaagtgctggtggagaagacagacctgattccacttcttgaaaaagtaatgatcaacttccgattgattgcagaagaaaagaagattaatttccggttggaaagcgaacttaaatcaatatatgcatggatagaccgcgataagtttgaaaagatattctttaatctgatatccaacgcattcaaatatacaccggctgagaaggcgattacaatagaagtgacaaaacagacagataaagtgacaatctctgtggtggatgaaggcatcggaattgaaccgactaaactgcgtactttgttccagcgcttcgaaacactggcacagcagaatatgctccaaccgtcttccggcatcggcctgtcattggtaaaagaaatggtcgacatgcatcacggtacaatcaaagtaacgagcgaaccagaagcaggaagccgtttcatggtaactctgcctcttcaaaaagaagtcttcgaacaagacagtcaggtggaatttattctgaatgacagtcaaagtccgactacccatccggacagcagcctccagactgagaaaggaccagaagtggaagacaaagaagatatggagaataatgcggctccggatacgtttactatattggtggttgaggacaatgaagaactgaaagctttcttaaaaaacatcttgtctgagaattatactgttatcaccgctccgaacggaaaagaaggattgcaacacgcagttgataatatccccgatcttatcatcagtgacgtaatgatgccggttatggacggcttggagatgattcggaaaatcaaagaaaacaataacatctgtcacattcccattattgtattatcggcaaaagcctctttggatgacaggattgccggactggagcaaggtatagatgactatatcacaaaacctttcagcgccacatatctgaaaacacgtatcgcttcactgctccgccaacgcaaatccttgcaggaaatctatatggccaaactgacggaagggaaagaaatagctgtcgcagaagctcttaccccgtcgcaaccgcagattactccctacgacgagcaattcatgcaaaaggtaatggagttcatagaagaacagatggataatgccgaactgaccatcgacgaatttgcagagcatctgatgctcagccgcaccatcttctatcggaaactgaagtccatcatcggactgactcctgtagacttcatacgtgaagtacgcatcaaacgtgcagcacagctaatagacagcggggaatataatttctcacaggtagcctatatgaccggtttcaatgacccgaagtatttcagtaaatgcttcaagaaggtagtaggtatcacgccttccgaatataaagagaagaataaataaaaaaagaagccgaccgtacgcattcattaatcaccataaccggctattttctttcgtagcacctaggtcagacaattgtagcacccaggtcagataactgaagcacctaggtaacacattcgtctcacctaggtgcaacgaaagaaaaacgactaaagacataaaagattttggctagcaggatacttatttatccctatgttccaataagttagcaacagttccgaatctgttaattccgctgatttccggaaagcagcatttttccggaatcctttttatattctttcccgttaataataatgcctgtagcattttttatctgtatgcccggagcctcgggatcctccactttgatattctccatattcacctgagaagcctgattgattacaatacctttcttgacattggttacagtcatgttcttgataaagatattcttaagaggcatttccggcagcccgttgaaatatactgcccgtcccgcacctctgcaaagaacatttgaaatataaatgttcctgaaaacaggagtttcctcattcacatccggtatcggagtttccggaaagtcattgacagcataatacaaatccatcgtcagagcatcattgggaatatcaatcatgttgatattatctatgaaaatgttctccactacgccaccacgtccgcgggtactcttaaaccgcaaaccgacatctgtgcccacgaaagaacagcccgatacgtatacattccggacaccaccggacatttcgctgccgattacaaatccgccatgtccatgcaaaaccgtattattcttaataatcacattctcacaagattctccccgcctgcgtccatcctcatctttacccgatttcagacagatagcatcatcccccgcatcaaaaaaacaattagtgaccagtacgtttttacacgactccacatccagcgcatcgccattttgcgaataccagggattgaacaccttcacatcgttcaaagtcaaagattcgcaggacaaaggatggatacaccagcccggtgagttcttgaaagtcaccccttccagcagaatccgtttgctctttactatactcagcatgacagggcgcaaccagcttttcatgtaagtccactcttcatcggttatttctttctgcccgttattttgtccggtcataagtacagaagctttcaaagcacccgcatcaggataccatacttttccgttctcatccactttaccacccgaactcaccagatttttccattgccgttccgtcatcttgtctttcttgaccggacgccatctatctcctgccccatcgaaaacaccattgccggtgatggctatattttcagcattcattgccgaaatcggcgattggcagcgcttagtgtccagcccttcgaaagaagtgtcgataatgggatatagagatgtatcgctgctaaatacaatgagagcattcttctcggcatatagattaacgttactcaaaagtacgacgggccccgtcaaccataatccttcgggtatgataactttcccccctcctttggaacttaccgccttgattgcattgtttatcgcctctgtgttcaaggtcacaccatcgctgagtgcgccgaaatcacggatattaacctcataatcgggaaaggaaggttggctcacttcaggcattgaaaacggaagattcctgtatacgtctccctgttcttttgttccactttccggatttgaataaacctgatatgatataaatatcataacgcctgtcagcacaactctcaaatcctttttcaaaattccattcatctctttttaatttattttatcgggttcctattgataactacttacagaaatatccatatcttcattgatatgtttttcccatttcacaagcaaaagtaatggaagtctactccccctaagttcaattattgacagattaggagtaaaaaatagtcatttacctgttcgtctattaaaattgtactcaaacaaagtatatctccggaaaataattcataaaaaagccatagtagaaaagtattataaaattcttccttactatggcccttaatctaatcctgaaaacagttttaatctatggtcagagtttcatcatcttgccaatctatagttccggcagcaccattttggtctgtccagcctttggtctgtccgagccaggagttattgtccaaaatatcttttgacagacccattatataataattagatcgccatccgatcttaatccattcattgctgttgttcttatcaggttgcgcattgggctccccgtactggaaattagactcccagaaatcagccacttctttaagttgcttttggaaatcggcagattcagggtctgcaaatatattcttacgcagttccgacaacacatctttactgcccggtgtatatccatcttttacatctacatatttagctgtacgatatctttcggtcaacggagttactcccaggaatgaacaggtattagtggtactcaactgcatagcttctccctggcctccgtcataaagcatccagcgccaaatatcccaatatcttttgccttcatatgccagttcgacctgacgttcacgcaaacaagcagccaatgccgatgcccggtcaaacacataagtatccaaaccgtaattattagtggaaggaattccaacccgcgcacgcaatttcccgattgcctgtttacataagtcaatctgattggtcgccgcataacactcggcaagattcaattgcaattccgcataacggaaatcatagatatgcactcccgaagcttcgtagttattggcagaagcagtattgagtccactcatcttacgtacgaataccggactggttatatttactccttcactataggcaaagccgctggtagttgactccgaagttcgccaacgataagcccagaccgtatcattggtgacatctttatgtccccacttcaaaccattaaaggcaaatgtctgatagaaacgcggatcacggttttccataaagcgcaaactaccttcggtaacctgatgagcggcatcgggaagtgtaccgtcagccatagggaatacatcgatcaactcaataggagcaccttttcctccgcttcctccttgagaactcaaacggatattcttctcccagcgattattcttgtaacctaatgacgagttgctttccttagccaatagtcggacaactaatgtttctctgttagaatgttcattatcgtcatccgccaatattctactccagcttgcagcatccgtcacgccgtccaatccgctggcagtaataccggaaatagcgttctgagtagcttccaaagctttttgccaacgaaggttgcccggatcattccaattcttattaaagatggggctggcatagaataataacacacggctcttgtatgccaatgctccgccacgtgtgagacgtccgtaatcgtttgttccccattcatccggcaacaaagcggccgcatcggtcaggtctttcacaatctgttccacacattgggtcacagaagctcttggcagtccggcatcggtcacctcagcattcagcactgttgtcacaataggtacgcaaccatacatacgaaccaaatcaaacaactgcatggcacgtaaaaagagggcctgcccttttgccttatctttggtatcctgcgaaaccgaggaagcatcaatgtcacgaagcaggatattgcagttacgtatacgcgtataagcattgttcgtaacacttgaacctagtgccttgccgaaataaccggcaaacaacgggtcgtaacttttaccgctggaagcatctgtctgtgtttttatatcatcaatggtcgaatattgcgtactcgggtcaatccggctggtagacgtgattccccacatctcatccgtgaattcgttaaaatcctgcgcataagaagtatacaatcccaaatactgcgacgtcggagatgtatagttttcaaaacttgtctggtataatccggccagataccaggtgattttcgtttcagaattaaaatcatcataagctccgtaattattcatatccaaaaatgaatcactgcaaccggacataaacataccgagggctaaagttcctgtatataaaaagtttttctttttcatcgttgatacaattattaaaatgtaacgttaacacctaatgaccaagttctcaaagtaggataatctgtagaagaagcatcatacatattacggtaatggtcagggtatggattgtacaaatcccacaaattattaccggtcagattcagacggacagctgacattttcaacggagcaatccactttttaggaagtgtatagctgacagacagattacgtatgtaacaacggaaggtactaatcatccagaaatcagagttggcgatagccgaactggaaatcagagattctgttcccaagttaggatatttaccattcggattgtacatttcgtcaaacatatctccccagaaagaatccggtgcccatatcattgtactcttattaccacccatagaagcacggtctatgaagcgtactccaccccatgaagtagcgatattggcactgatagcaagtcctttccaactggcacccagtcttgtcgagacattataagtcttattcttttcacataactttccataatcctgttccaatacaatctgtccgttgggaccttgttgaactccattgaccatttcgccccctaaatcctggtaagccagcatacccggacgcaaatcgtctttacttgtcttatccagatatttagtttgtccgccttcgggagtatatgattccagataagaccagtatctgttaatatcatcctgcgtacgcaaaattccgtcaccattcgaggttcctttccataccttgaatccccataccggcagataagtagacattccttcttcccagcttgagctggacggatatttgttataacgcaaacccggcacccactcttttactctactaccgttcagaccgaaatccataccgatattatagttcacctgtcctaccttgtcacgccatgtcaaagacaactcgccgccatatgtatcaacacggccaaaattttcttcagcatacgaaccaccggcatacacgggaattcccggttggctagccataaactgattcaagatgttatcattgatatcatagtagaaatcgaataccgcacttaaacgaccatcaaagaaacgagtatcaaaaccaagattaaacttgtcggaaacatcccatttcacattacggttcggagatgactgcgggatcagactggtacctggctttccgctttcggcaccgaactgcattcctttcaagtccatcttgtactgttctttccatttccacatcttgatattgtcacgtcccgtacgtccccaggatgcacgtaccttcaagaattcaaaccaaggaagcgagcgtttgaaccatgattcttcagacatgatccatcctgcagagataccgggaaagaatccccagtaattctccggagcaaacttagtcgaagcgtccgaacggaaaataaactgcaacatatagcggtcagcataagaatatgccacacgtcccaagtaagaaagcgagcccgattcacctttaagcgtcactgtattgtcggaagccagagctgacttgccgtccggcccgacgatggagggaccaccgactcccagataagtatcagaaatgtcatgagccagatcggcatattcaatatcacgagaatcatagaatgattcataacgctcgatggaagccatagccgaaatgctatgttggccaaacgtacggtcatagtttacgtaaaagttcatctgacgtctttccgcctgtttatctttaaatgataatgtactgttcttatcaaagatagccgttttaaaggaactgctcgggatggtatagactaaatgctggtcggcaggcattctgccgcctacatacgccagttcataagggaagctagcctgctcggttgcttcacttgagtgcgaagacgaataagtggcacggagtgacaaacctttcacaaaaggaacttcgtaggtcaatgaaatgtcagcattccagctgttgctcctgtttttactgaacgaaccactattattcaacgcaaaataattccaggaagtgacataatctctattaaagctcggactactataggtattctcgataggtcccagccaatattcctgatcttgcccgttttcattcggtaacgtcacgctccaaggcatatgattgggcatatgatgcaaagcactatagtctgacttttccgtacttccactcatcccgtacagtttaaagcgggctccttttgtatagatctgatcggatttaccctcattaccggcaaccgtggctgataatttaatatcattcgttaaacgcacatcaacaccggcacggtaagtataacgcttatagctttgatcacccaaatttgctccctggtcaaaaaaagtagctccggcataatatgtagcacgttcacttccaccggtaacattcagtgtatgtgtctgttggaaagccgatttccagcctgctttatccagccaatcataattcaggttgtccatctcagccaattccatatcactatacagtacgtcgaggtcgtcataaccactcgctttattggaacctatcgccaaagcattatagaaacgtccataagcagaacctttcagcaccttggaatgactaacggcatcattgacggcaaatttacctgaataggaaatgacaggtactcctttttttcctcttttggtctttacaagaattgcaccattggcagcacgagagccgtaaatcgctgcactggcatcacgtaacactgttatactttctacttccgaagggtccagcatattaaactgctccatactcggctgtccattcgttcctaactgaatgacatcatcaataataatcaaaggggtggaattaccgccatccttggatattccggtgaaagtccggttctgacggatataaacctcattggcattcgtacccggacggctggagcctaactgtacattcaagccattcaccattccctgcaaggcttccgaaagattggataccggaagatcttccagttcttcagcagaaatagtcgatacggaaccggtaatgtttttctgtttcatactaccgtaacctactacgactacttcatcaagtttctggttatcttcctgaagaatgactttcaaagtatcgcctttcggcaggattacttgtttcagatatccgatataagatattaccaccttttttccatccggcacattcagcgaaaagtgaccgtcaatatcagtaatagtacctgtcgtagcatcctgtaaccgtatagtagctccgataatcggctggccactttcgtccactatctgtcctgtaacctttcgggtctgtgcattggctgacagcgcaaatgctacgaaacacaatagcacgcctacctttttaatgaatgaagatctcttgaacttcataaatacaatgtgtttattcatattatatatattatttaatgcgcggttcatcgtctccattttgaagcacctacgctggaacaacctgtgaataactcgttcaatttaaaattgttagtccccggagcagtgaacagagtggtagttgacattttagaatcactcagtccgaggtttcctttgcttgaagtacgatcattagcctgaaaactattaaccgaactgaaaggatatacgccggtataatcatcctgtcctccggaccccagttcattaaatttcggaagttttccatctattttcatggaaccgccaaatacacaattttcaatcttgacagcaatactcggatctacccggaataagaaggagttttccatcggcgcataacagaatgtagtgtttgtaatcgaaatactctttccactgctactattccgcaaatctgcaataccgcaaatattagtgatagtacactcatcaaaagagacatcattgatgtaatttccatttttgccatcagtcgaaactataccctgattaccgattgcgttaatggtacattctttgaaagcaatagctcctacatttcctgtagccttttttgaacggacaatagaacggaaattctcaatatagcaattagtgaaatcaatcgtgttaatcagaaaaacatcggactccggacaaatcacttgtttaccactcaaactgttatcagcaacctcacttaatgatttggaagccctaagattgatgcgtttaaaagtaaccttgtctacaactccgccttctactatacggaaagcgttatcaaaactaaatgtcggataatcttccaacgtttgcggagtaacaaaatgaactgaatgtgcaaactcaataacagtttctccactattcaacacgtacgtcttacctgccggaagcacaaaggttgtaccttctgccagagagttccagtcaagtttattaaaataatcaggatcaaatgcttcgttacgcaaatctatccggtttgccgtcccataatcttcatccagattttcggttacagttgtctttacttctatgcgtgcctgataagtatccgaactctgttcatcacccgaataaaaactaacacgataagaagtctccggagttaaatcatctataattttggagccggccaaatattcttcggaagaaacgttataaacctttatatcttgagaattaacagtctccagccccatcggaacagcagtcagagctgtaatcacaacagtatcattaggcatccacgaaataagagcctgtgtatctatagtacgagcttctcctaactctatcgacaaagggcggtaaagaacacccgtcacctctgtttcccaataaccggacagccttccgttaccttcacatttcaccttaaacttgtagttttcttcccagtctaaatctatcacacaggaagaacggtcacccggcacggtctccgtcttataaagttcttcccctttatccaccaccttatacacctcgacgatatattcggtcgctccttctacgcttttccaactaagatatgccttgttttgcactatctccatagcagtaaccggtcgtaacaatacttttgagccggcatcatcatcgtccgaacagcttgtcatcagtcctgaaaaacaacttaacaggcaccctactgtcattaatttcaataaattcatagcattctattttaatattaacactgatttcacttcttaaagttgtaggaaatactttcacctaccagactattaagatatacttccaaagctgtataaccaacctctgttgtcctgttacggtcttccggattagcagggtccaaaccaacctttttctcccaggcatcatccatgccatcctgatccgtatccgtaatggttccgctggttttatatgtcagtccatccagaccttcagcctcatctgggctatttattatgcccgggatagcaccactattggtgtctccggctcctgtataagtacaaagtccgctcttcacttcttttacaatacgcacatctactttatcacggggaaatgcaccggcaccacttttatcagccaacacagattgataagctttctccgcagattcatattggtcagataaagtgtatgattcccagtcgaaccaatattgttcataattctctttccctgaaggaataatgaaagaagaaactttcatctcatcgatagaataaggataattaccatccgtatatacaccttcccaattgtcggaagtcagttgagaattaccctccattacattaccatgaaagtaccactttgaaacggcacgcaaaggtgccttattgggttcacgggcgcttgattgccggaagaatttcagttcttttacccgggctgtcgtagcgggccccggtttataataattattcacaaaattacatgaccatccatgatgttccggatcctgagactcgtccatacctccataagtagccatttggctgccccaattataattcacattattaatatattccatataaacaacgatatcctgtccgggatccttcccccgtgcgccattcatcaatggcgtccggctattacaatgagcaaacagattatggtgataagtagatgaagttcctccccacgcaccaccataagcacgtgcaccttttttattgaccgaataataaagcccctcgctggaaatgcaccattgcactgtagaaaaatgagtatcaataaaatcggtattctcttcactagcccagctgaaggaacagtggtcaattataaagttattcgcattttccacccgcagacaggcggcattatgttcctttccactcgcatctttttcaccgacacgaaaacgcatatgccgaataataaagttctccgaaccaccaaaatttatttcattcttaatgatgcaaacaccatcaccgggagctgtttgtccagccagcgtgaagttcttagctttgcaacggatttccgactttaattctattttacccgaaactgcaaaaacaacagtagtagcttcgttttgtgagcattgctgcaatgcccatctaaaagagccttctccgtcatcgttggtattggtcactataacgacttttcctccacgacctcccgtggcatttttaccgaagccttcagctgtagggaaagcctttaatacctccggtcctttcgcataggggcctaactccatattagtaaaccctttaacatcggtacacgctcctaaaaataaaagacaagcacaaaaaggatattgtaccaggtaacgtctgaaaaagactggagttaccacaaacgtcgttctaataagcacaggaaagcgttgataccaggatttccatttcttaataaatgcacaatttttcattcatttcaatttaaagttaatacatattactatctaatcaatacttatattacatgcaaatcaatcgttgaaaacatggggaaaattgaaacaggaattatcttgtgtttattcattaatattcctgatttatagttcttccttaattccgcaacactattataaattaaactttttaagtacctgagcaacaaaaagttgctcaggattttgccatgtcagaattttcacttatcttagtgttgcaaaaaaaacaagagaatccgacgatagacatggcgaagatacaaattaaatctgagagactcactccttttgggggattattttcaatcatggagcaatttgactccacattatcatctgtaatcgactcaaccctcggtctaaggtgtagatcgttcggttatcagtacagcgaaatcatccgttctctcatgagtatctacttctgtagcggttcatgtattgaggatgtcactactcatttgatgaaccacctctcgcttcatccgacacttcgcacttgtagctctgatactatcctcagggcgataaaggagttgacgcaagaaaacatttcatacacatcagatatgggcaagacctacgatttcaatacggctgacactctcaatactttattgctcaattgtatatttgcatctggccaactgaaagagggtgagatgtatgatgttgatttcgaccatcagttcatagagacagagaagtatgatgcaaagcctacatacaagaagttccttggttatcgccctggcgtggcggttattggcgatttgatagtcggtatagagaatagcgatggtaacacaaatgttcgtttccatcagaaggacacgctgaagaggttctttgcgagatttgaacagaatgggctcactatcaatcgcttcagagctgattgtggatcatgttccgaggaaatcgtggaggaaatagaaaaacactgcaagtccttctatatccgtgctaaccgctgcagttcgatctacaatgacacctttgctctcaaaggctggaaaactgaggaaatcaatggcattgagtttgaattgaactctatccttgttgagaagtggaaaggtaaggcatatcgacttgtgattcaaagacagaaacggatggatggtgtgcaggatttttgggaaggagaatacacataccgttgtatcctgactaacgactatgattcttccgtaagagaaattgtcgagttctataaccttcgtggaggaaaggaacgtatcttcgatgatatgaacaatggtttcgggtgggacagattgcccaaatccttcatggcagagaacacagtgttccttcttcttacagcacttatccgtaacttttacaaggccattattcaaagacttgacgtaaagaagttcgggctcaatgcaacaagtcgcataaaagcgtttgtcttcaggtttatctctgtaccagccaagtggatcaggacatcaaggcggtatgtgctgaacatctatacctgtaataatgcttacgcagatgttttccagactgattttggataatgcctacaacttatgggaatgatattgtgtattgcctcaagtcacattgtggggtaaggggatattgtaggcagaagtgggtgcttcaagttcaaattatctgcaaattcagtaatgagaggacgtgtaaacgcaataaggacgttcaagggcttagttgcggatttgaggttcttattttttgtttcatatgtgcaaaagaagttatataaaacataaagcgaggggactttttgagcgtttaggtgcactattttatcactaaaatatcagatacgagattttgggattaaaataccaaaaattccatattttactttacatagtaatttcgactagtcattttcagtatttgcttggattagaataaaagtgtccatcaggcagctggcattcattactttaaatgctagccgcctgatggacactcaaattttagctgataacgaacgaaaatgaatcatccgttgatcaaatagctatttcttatagtcctaaacgttcttttaataacctgtaacccgaaaggcttacccgaagtttaaccccgtttttcaataatagctggtacgtttccttcccaaacagttctacacgggagatttgagtgacattgacaatcgttgagcgatgaacacgaacaaaagtatcggaaggcaaatgagtctcaaaatacttcatcgtctgttccttcagatattcccccgaaggagtaatcagcataacgtagtctccgcatgcttgtatgtagattaattcatccgttttaatcaaatgaattttcgaaccgtctttcactgtgatacggtcaatctgctctatctgcggttcttccggcaggctaaccggttgatgcattatcaattctttttccagttcctgattcagtgcatcttctttagcgacaatcaagcgataccaaagaagaatggcgacccaggtcggaatgccaaacaacagacgaaaagggatggtagatgcaaaagtgatatagggcataccggctatccttgttacaatatcgtaaaccataaagttgccggctatccagatcagtattcctgccaccagagtaatgacttccgtctgaaagatagagactactccgacaacaaaccaggccaaataacctaatgccatcaaccaaccgattgtcgctattccgtctatgacagcaggcacatagtccgcacctgtgtatacactcattatcattacctgagctacaaccaataccagcgctaccaccagcatcggcacccagcgataaggataatctataatcggatgtgctttcatacgttagtctttaacttccagtcccccgaaagaaagccttccccgaatgactaatacactttccttgttaatattcccgttttgccagcgtttgtcatcacaaccgccaaagaaagcattgcacttaaatactactttccagtcagaagggacatatatttcgatgcctccccaactgcaatccaaatcgatgtatgtttctcccggtgcgatatgagtatggcgcaggtcaatcgttgttcctccacaagaggtacggacgactgctcctttaaaaagttcatcaagcacaacatgacgtgcagctccaaaagtgttatcagaacgcagaaagccatcttccgattcactttgctgctgattgttggcaaagttcatgcccgcatgaccataatgtccatgtttcatccattctctatggtcacgaaacatacgctgtttatcattccatggtcctctgtgtccggatttaaaaagaaataaaactccggctatgatcaaagctaagggccagaccattgcctgagaattctcaggcagccatgaaagacctcctagcaaaaaataaacacctaccaatacaaggataattccaccaacaaaatgacggcgtatcatcgaataaattcccattataataaaaagagaataccatgatactattatactaaataattcagcagtaatccaacccatattgcgggcgaacaacaaaatccctgaaaggataaataatgaagctaccaaaagttttcctgaaaaacctgtaagagatgagaatttagatttctgttccatcgtttctatgattaatgattgatggttcaaagatacatcatttctttgtgcccttacaggcttttcagatgatttccggtcagtaaaccgatgaataccggataaaaatcggtgaatggaacagagtaaagcgcaataaattatgctctaattgaatctaataacaaaaaatacaatgtgaaaaacaaatattgcacaccgacgtcttttcttccctatacatttgcaaccatataattaacacaatacgtgagtacaaccaatattttaaagaactaatgccatgaataaaacttttttaggagcttttcttgcatctgtcttcatatcattcacagcctgttcggaagaaaatctcgaacaggacacaaatcctccaacagaacagccgggagattctactgatccggatgattcgggagaggatcagctgccggagtatccgactcccgaccgttcgacagtcgcagcttttcccggtgccgaaggagccggaaaactaactagcggtggagccggaggaacagtatatacagtaacttctctcaaagatgacggttcagaaggtactctccgttgggcgatagagaagtcgggcaaaaggacgattgtgttcgctgttggtggagtcatccctttaagcaaacagctgcaaataaagaatgatgatataaccatcgcaggtcaaacagctccccaccccggtatttgcctgaaaaattacactttacgtgtcaacgcaaacaatgtcattatccgatttatccgttcacgcatgggggatgaatgtaagacggaagatgattcgatgaatgggtatcaagattcttatcccggcaaaaggaatattattatcgaccattgctcaatgagctggagtacggacgaatgtgcttcattttatggaaataccgactttaccatgcaatggtgtatcatcagcgagagtctgacaaattctcttcataacaaaggaggacatggatatggcggaatatggggaggaagccctgcaaccttccaccataatctgctggcacaccatagcaaccgcacgccccgcctctgcggaagtcgctactctaacagagaagatatggagaaagccgatttatgcaataatgtaatctataattggactggtgaaggagcctatgcaggagagggaggttcttataatatcatgaataactactataagccgggccctgttaatgccatagcgaaagtacattgccgtattttcaccgcttatctagatgatggcaagaatcaacaggcaaaaggagtatatggaaaattttatataaacgggaattatttcgaaacacatgagaagttatctaattcacaaaagacagaattggccaatgcaaatgcagataatacctcctcaaccgctttttgcgtaaaaaacaacgaagtttcaacaaaagatttgcttgtatctttacgttttcctatcttagatgattattcgttcgttcagtctgcacaagatgcctatcagtctgtattactatacgctggtgcttccaatctgcgtgacaagattgataaacgtattgtaaaagaaacccaggaaggcactttcacatacacaggctcaaacggaggaacgaacggactgatcgatacacaagctgatgtggaaggatggagtgaatacgcatccactaccaccgcacagcaggatagtgacaaagacgggataccggacgaatgggaaacagccaacggactgaatcccaacgacagtagtgacggaaacaaatataacttaagcaaggaatataccaaccttgaagtctatctgaatagtttggtaaattccttatacccaaccaataactaagtagctatgaacaaaaaaatcctgatagggctatgtgccttatttatgctcccttctatccaagggaatacaaatactgacaattcgtacaaagagaatattactcccgaccgttcaaaagttccagccttcccgggtgccgacggtgcagggaaatatacaacaggaggtgccggtggaacagtatacactgtaacttcactggcagatgacggttcggaaggaactttccgctgggctatcaacaaaaaaggcccccgtacaatcgttttcgcagtcagcggcatcattgaattgcagaagcctttaaaactcagcaatggagatgtgacaatcgcaggtcaaacagctcccggagatggcatctgtctgaagaactacaccttttccattcaagcagacaatgtgattgtccgctttatccgttcacgtatgggagcggacatcaagcaaaaaggtgacgatgcaatgaacggtaccaaaggaaacagtaacataatcatagaccattgctctctgagctggtgtacggatgaatgtgccactttctatgataacagtcaattcacccttcagtggtgtatcatcagcgaaagcctcgccaactctattcatgagaaaggagcacatggctatggtggcatctggggtggacaaaaagcatccttccatcataatctgctggcacatcacaccaatcgtactccacgactctgcggcagccgttataccggcaaaccggaagaagaaaaggtggaattattcaataatgtaatctacaattatggtagtgacggggcttatgccggtgaaggcggttcgtacaactttctcaataattactataagccggggccctatagtgctaccaaaggttcataccgacgcctgttcaccgcttatgcagacgacggcaaaaatcaaaatgaggcaggggtacatggaatcttccacttcaaaggaaactttatggacgccacctgtcccagcctgactgacaagcagaaagaagctctttataaagtcaatatggataatacatttggtctgatcgtcaagaacgacttcgcaccggaaaagaatttattatccaaaaaagcatttgatatagcagagcatacttcattgcaaccggcaaagaaagcctataaagatgtactgcaatttgccggagcttctcaccgccgcgatgccgtagaccaacgaatcgtagaagaaacccgcaaagggaattacacttatgaagggtctcatggaagcaccaacggaatggttgaccaaccgatagatgtaggaggctggcccgaatataaatccgaaccgaccccaaccgactccgacggagatggcataccggacgaatgggagaaaaagtacaatctgaatccgaatgatccaagcgacggcgcacaatatggtttgagtaaagaatacaccaatctggaggtatatctgaacgagctagtgaatcatctgtatcctgcggattctaaaaaataaaactaaaagcccgaataaacagttataaaagattaagacgagagtacatttccccataaatcctcgtctttatccattttatgccggaaaaacaaaaaatactatcgtaaaaacaaatattacacatcccacaagccccaaaaacataattttgcaccagtgagaactctaagagtggacacactcgaatattaataatctaatataaaagaacaaaagatgcctaaaggaatgaaaaacatgcgcactttgctgctaatgattttcgcagcattatcgctcagcgtatcagcgcagactattaccttaaatggtaatgtgaaagacacaaccggagaaccgattatcggtgcttccattgtagaaaaagggaatactaccaatggtacaattactgacctggatggaaatttctctctaaaagttcctgccaacgccactgtagttatttcatatattggtatgaaaacgcaggaaatcgcaatcaaaggaaaaagcaagattgatgttacactatcagatgatgcaaaagcgttggatgaagttgtagttatcggttatggtactgccaagcgtaaagacataacaggatcagtagcatccgttaattcagaaactttagcagccattcctgtagcgtctgcgactgaagcattgcaaggaaaaatggcaggtgtacaaattacaactacagagggctctcctgacgcacaaatgagtattcgcgtacgtggaggtggttcaatcacacaaagtaacgaacctctctttattgtagacggatttccagtggaaagtatctcagatattccacctacagatattgaatcaatcgatgtattgaaagacgcttcttcaactgctatctacggtgcacgtggtgctaatggtgtaattattgttactaccaagagtggtaaagaaggcaaagttagtgttagctacaatgcttattatgcgtggaaaaaagtggcaaaaacattagatgtactttccgcaagcgattataccaaatggcagtatgaactggctcaacttacaaataagaatgatgattatatcaagtattttggtaattatcaagaccttgacatgtatgacaacgtagctaccaatgactggcaggatttaactttcggacgtaccggacattcatttaatcacaatctaagcatcaatggtggtagcgataagttcaaatattcgttcagctactctcatattgatgataaagctatcatgcaaatgtctgactatgcacgtgataacctcaatttaaaattgaatcacaagcctctgaagaacgtttctttagatttttcagcacgcttttccaaaaccaaaatcaatggtggaggttccaatgatgccaacagttcattgaacacggacaaacgcctgaaatattctttgttgtatactccatatcctgtacctggtatctctgatgcactcaatgcagacgaagaagatgccaattctctattgattaatccgttaatctccctaagagataatgacacccgcaaagaacgtatcaactataaccttgccggctctatcacttgggaaataatcaaagatttaaaactaaaagcagaagttggttatgacgattatcgaaataatgcagaccgctattatggtgtgactacttactatgtaagaaataacgtagacgatgaagataagagtaaacctgctatttcttttactcgtggtacaagaactgccttccgcagtacaaacaccttaagttatgacttcaagaagttctttaagaataacaaaaaccatttaaacctattggctggtcaagaatatattgttaccagagagagagaattaagaaacgttgtacatggcttcccgactgaatatacggcagacgactgcatcaactattccacaaaaggaaacccatatgaagtgaccaattatggttatccggatgatgtgttgttctcattcttcggacgtgcaaactatgactttgacagcaaatacttgtttagcgccactttccgtgccgatggttcttcgaagtttgccaaaggtaaccaatggggattcttcccttctgccgctgtcgcatggcgtatatcttctgaatcattcatggagaataccaaaaattggttggatgacctgaagctccgctttagctatggtacagccggaaacaataatattccttcgggacagatctctcaattatatgagttaaataaaactccatggatcaatggtgtcaattcctacattgctccaagcaaatatatggcaaacagcgatctcacctgggaaacaaccattacaagaaatgtcggtttggatttcactactttaggaggcagattaagcggaacaattgaaggctactggaataatacaaaagacctgttaattatgttcccgacatccggaactggttataactaccaataccgtaacatgggcgagactgaaaacaaaggtcttgaagccagcgtcaactgggtagccgttgataaaaagaattttggtctgagcattggagccaatatcagttttaataaaaataagatcaaatctctcggttctttacagaagcttactaacgaacaagcacaatcttattgggcttctacagaaataggtcaggatttcttgccggaagtaggtggttctgttggaaaaatgtatggttatgtaagtgccggacgttatgaagtttccgattttgagagttatgatgcaacaaccgatacctggactctgaagaaagacgtcaacaaatcttctgccgtaggaactgcgcgcccaggtatgatgaaactaaaagatttggataacagtggagatgcgaatggtgaaaaggataaaacgatcattggcgatgccaatcccctgcatacaggtggattcaacatcaatgcccgcctatatggtttcgacctggcagccaactttacatggagctatggtaacgacatctataacgctaataagatcgaaacaacttctacttccaagtacttatacagaaacatgacttctgaaatgtccgctgcaaaacgttggactaatattgacggaaacggcaatttggtaacagacatgaaccaattggcgcaaatgaacgagaacaccacgatgtggtcaccttatatgagcaaattcgtattctcggattgggctgttgaagacggttcataccttcgtctgagcactttgacattgggatatactctgcctgctcatctaaccaagaaagttggaatcaataaccttcgtttctatgtaacgggatacaatctgttctgtatcacgggatatagcggttacgatccggaagtttctacttgccgcagaaatggcagccaactgactccgggtgtagactattcagcatatcctaagagccgtcagtttgtaatcggtttgaaccttaatttttaatcagtaaaactagtaagtaatgaaaaaaatattatatacagcattagcagcatcactatttgctttttcttcttgtgatgacatattagatacttccaaaaagtcatctatggaaaagacagaagttttttctaacgaggctttggtcaatgatgtagtgatgggactgcaccagtcattcggtgaaacaaactcttatcgtggacgttatattgcctacttcggagtcaacagcgactgtgaaatctggaataatacggggaagaaaggagctttcactgataaagaaggagccttggtaacatacaatgccactaccgataatcaatacatgaatacggacaacaacgtttgggccaaactttatgaagccatagaacgtgcaaacagcgctataaccggtatggacgagtacagcgatatgagtaacgccaatatgcgccagttttacggtgaactattgaccttaagagcttttatctatttcgatctgattaaagcgttcggtgatgtccctgcccgttttgagcccaacaccacagaaacaatcgacttgcctaagaccgaccgtatggttatcatgagaagactgttgaacgacttacttatagcacaagactacgtaggctggcctaacgaaaacagctttactaaatcaacagaacgagtaagccaaaccttcaccaaaggattacgtgcgagaattgcattatttgcggcaggttactcacaacatccggatgggatccgttacaatacagaagatgcaacagaaagacaggaactatatacaattgcaaaaaatgaatgtctggacatcatcagcaaaggctataacacattaggcacatttgaagctaactttaaagcactatgtgctgaaggaacaattgcaggagcagaatctattttcgagattccattttcggcatcccgtggacgtgtcatctacacttggggagtgaaacacgaaaagaaagaccaatggacaaaactagccaaaggaggcataaacggccctattccgactttgttttatgattatgatgtagaagatgttcgtcgtgatatcacttgtgtaccttttaaatggacaagtgacaacgatggagacattgcctggaaagcacccaataaatgctggggtggatggagttttggtaaagttcgtttcgagtggatgaaccgtgtagttgactcttcaaatgatgatggcatgaactggcaagtaatgcgtatggctgatatttatttaatggcagcagaagctatcaatgaactggaaggtcctaaaggatcgtctgatgcaggaaaatatttgaaagcaattctcgaccgttcatacccggccgaaaaagcaagtgctatattaacgaaggcaaaagccagtcaggatgcattctttaacgtaattgtagacgagcgtaaatttgaatttgcaggagaagcaatacgcaaagtcgacctgatccgttggaatcttctaggaagtaaaatgaatgaagccaaagagaaaatgacacgattatataaccgtgaaggtgaatacgctgatcttcctttgaaaatctattataatgagggcttggatggaacagatgcaacttcctacaaaatgtatggattaaaccatggagatacagatgaaataggacaaacattaggctactctaaaagtaaggaatggattgtaccgaaagaatctgcagaccaggctgctgctttgctgcttattgaccaattgtatgataacaatcccgataccaagcaattctggcctatctggaaagtatttatagacggaagtaacggtgtgctaacaaacgattatgactattaatgatgaatgaattatgaaaaagaattatatatatacagtattatttagcctggttctgtctgcctttacagtaagctgttcagaaccggatgacgaagtcacgacgggaatatttgaccgattattctcaccgacaaatgtagaagctgttatccaaaaaaagacaaatgtaaagtttaaatggacagcagtgacaaatgccacatcatatacgatcgagctttatgaaaatcaagatatgactttcgaaggtactccgaaaacatatgaagggattacggacaacacatatactgtagaaggactattgggtgaaactcaatatacagcaagaatcagagccttgagtgaagagatcaatgaatcaaaatggtcggctgtttccttcatgacagaagcagagaatatcttcaattctgtgaaagacgaaaatatagaagcacatgcagtaacgcttacatgggatgctattgatgcaacggcaaccaaaatcgtgctgagtgcagatggaaaagcagacataacatatactctgaaaagtacagatatagccaacaaaaaggcttatatagacggactggaagaaagcacatcgtatacagccaagttatacaatgtagataagctccgtggtaccgttacatttaaaacagccattgactttcagggaaagactcctgtatatgaaggtgatgatcttgctaccgtactcgaaggagcagcagatggtgcaaacatcgttcttgtatccggttcgtttgttttgggagattatgcactaaacaaatctgttatcatcagcggttatgacaaggcaaacatgcctaccatctatggccgcttacaagctgaagccggcgcttcttccatagaaatcaacaatgtaattttccgtggtgacactccgggagcagaagagttggtttcaaacttcatagagttgcaaggtggagctaatatttcaactttaacagtcagcggttgcgaaatcagaaactataagaatcagattctttactgtaatgtaacggcaactttaggaacagccttgtttgagaactgctgggcagataatattacaggttccggtggtgacggcttcgaccttcgagccaatacgatattaggaacattaactatccaaaactcaacctttagtaatggtatacgtaccttcctacgttgtaatatgacatcagctactgtaaatgtaaccaattgcactttctacaaagtatgctcttatgatggcggcagcaataataatggattgttcttaatggataaggtttctacttctacaggcaaattaactgttgagagatgtgtattctcccaaatcggtgtcggaacattaggatactgggcaaagaagggaaagatgaaagctcaggctagctattctaagaattactaccataacagtgcaaacctatgggatgcaaccaatggactttatacagacccgtcagcatgtaatgctacagaaatagaccctaaattcacaaatcctgaaagtggagatttcactgttggagctgaagatatcaaagattccaaagctggcgaccctagatggattaaagaataaatctgataattaataaaccctaagtgtctgtttcagacactgtatataaaaagatagcgatgtccggattcgaatatcgctatctttttatattcttccaaagaagtgcatgattcactcccgtcttgtacatcattcatccaattcttatacatcttttccttaaatcttctacatccttggagtgactctagtacatcatcataacaactcttgtacttctttctatttactctaatacaaatttataaaaaaacctgcctgtcaggctaacaatgaaagaatcagccacctactaaataaagttgaaatccaggtattcagttctttcagttatccctgcaaaatccctgtcagaaggagatacagctgaaagcagtagtctctgaaaagaggtttcagcattcagctctttcagtttcaaaaacagagcctgcgtttgttccaatcagaagttctatttactaaaagtaaaaggtctattttacttaaacagaggctctattcattcatcatattttcagcgctgtttctatcattctcaccttatttgtcagcaaactttagctcggaggtcagcaagcctaagcctacacgtcagcaagcctgagtcgacgggtcagcaagcctttgcccgtacgtcagtcagcctttgcctacatatcaaccagcctttgttcagaatttaagatatacatagcttatcgactataaaagcagaaactcaaactataaacctgaaagaactgaaaccacgcccccccgctcagagcacgtctacgcaagggtacgaaatggtgccttcagccgctatcaccttctatcaaggcttttccgaagaaagctgaaacggctgaacgctatttattcaatgaaacttctaaggagataaaacagcaagaagctccaattaccgaccgactttctcccgatactctgtcggagtcataccgacctgcgccttaaaacatttactgaaataacgcgggtcattgataccgaccatataagaaatctgagtcatattaaactctcccgtttcaatcaattgtgcggcacgcttgatacgcatttcctttatgaactcgataggggccagtcccgtaagcgtttttagtttcttgaagaacaccgaacgactgacagccagttcacgaaccaaatcatccactaccaattccccgttatccatattctgctccatcaaatcaaccagtttatccataaatttacgatcgttaggagacatttccggcatcgcaggctcttccgctgcactacttacgggttcagcagatgcatgacctgctaaagtctccccttgagcaaccggagtttcagacaccgtcacatgcgtcagactatcacgatagaaattttgcagtttcttacgctgcatcagcaggttctccacccgagcctgaagataagtcgcactaaaaggcttggtgatataatcatccgccccatattccagtccttccaatttactttctatcgttgtcttggcagtaagcagtatgataggaatatggctggtcgtcatatccgcacgaagttcacgcgtcatttcgataccgtctttctccggcatcatgacgtcgctgataataatatccggcaaatacttcaaagccttgctccatccctccataccgtcggaagcctctaccacccgataagttgaagcgaaaatactgcgcaggaaggaacgcaattcctgattatcctctaccagcaacataagctctttcgaactgctttcctcagcctcttctttggcagcagatacttccaggtccggcgcatctgcgatggcagcttctgtctgaagcgaagaattagcgatatccacaatacgttccatgctcagcggagcaaccgaatcttcgagaataaattccactgaactattataatgctctttgcccttcagaaagtccactttaaaacagcttccctcaccgagccggctgtcaacggaaatcgtagccttgtgcatctctaccagttccttcaccaaagaaagaccgatgccggagcttgcctgattgaaaatattcttgtccaccaagttctcaaagcgcacaaagagagacttccgtttattttcggcgataccaatcccctgatcctgtacgccgacagacaccgtgccctcatcttcacggataaagacggtgatcattttcccgttaggagtatatttaaacgcattggacagaaggttaaacacaatcttttcaaacttatcggcatccacccaaagattcaaagcctctttctctgtctggaaaaggaaatcgatgttgtgttcttccgccaccgactcaaaattatccataatcttgcggacaaaggcaacgacattcaactgttgcacctgcatcttcatcttcttgttctgaatcttacggaagtccagaatctgattgaccagacgaagcatacggttggtattccgttcgaccactaccaactgttcccgtgcatcagccggcagtttatcgttcttcagaacttgttccaccggacctgcaatcaatgtcagaggagtacggagttcatgggatatattcgtaaagaagcgcagcttgatatcagaaatctgttgttctacagacacctcatgcttcaaccgataaatggtaaacaggatataaaccgcaacaaaaataatcagcagcacaaagcagacatacagcacatacgccaaaggcgtctcccagaaagaagggagaatcgtgatgttcaaaatgcgctcattgtccacccacaccccgtcactattggtagaacggacacggaatatataatctcccttcggcaggttagtataggtcacgcttctttgccggtcagcaaaagtccactgcttctcgaaaccatcgagaatgtatgcgtactgtatattctgcggattcgtataatcgagtgcagcgtactgaacggaaaaaatattctcatcatgagaaagcactagttcctgtgtatcatccaaatcgactttcaatatggacttctctcccggaattacatcttcattcgctaccatcaacttagaaaaaactacaggaggcacatagctactcttccggatagaatccggagtgaacatgaataatccgttgctggttccaaacaacatatctccgccggatgtgagcgtagaagccgcttcactgaaacggacacggaaactgatactacgttcatcgtaattctcaaaacgctcgccggaaggaacaaacttacagattccattttccgtactgatccagagattctgtttatggtcttcacggatggaaagcaggacgtccgaagaaagtccgtcgagcaccgagtaggatttaaattcaccgtgaccgtcttcgctgatggaaatcagtttgttcagtccccctccgaaagtagccagatagagttccttctgctgggtagcgataatccaatgcacgtcattattacttagactcttcgtatcgttcgggacacgcgagaagtggtggaactgtatatcttccggctttttgaaattctcatcaaaggcaacggcgcctgtggtagtacctacccaaaggcgtccgttattatccgaagtgataaaacgtgctttgtaacagacatcaatcggatatcctttcagattattccggtggttgataaagacggtctctccatgttctccctgggaaatatagttgataccgcctgcaaaagtagccgcccagatacgaccatgatgatcttcataaacacaatatacattgttgtcactcagactgtacatatcgttggagtcgtgctgataacgggtcagtttataagacatacttgtgggagaaatctgttcggcacgcaccagaccgtttcctttggtagcaatccagataatcccttttgaatcctgcataatgaaataggctgtaccctccataggtgtacctgtcatcgaaatggttccattacctgtcagatgccctatgaatttccggttcgagtcgtacaggcggatcattccgtccttcagtccgacccacaaattcccctgtttatcttcgcataccgaccgcacttcgttgctcaaagattcatattcatgcggaacgggagtcagcattgaaaacggtacgttgcggaatgttactttctccagtcctttggagtgggtacaaagccacaaattcccctgtttatcagaaaaagcggcatgtatcttgttagaaaagcgccagttgttactgcccaaatcatcataaaaaggaacgagacagttccggtcacgatcaaaataggagaatccgccgccataaggatgtacccatatatgcccgtggatatcttcatggatatggaaagcgggacgtgaacgatcggcgttactgtattccacccgcatctgttcacgctttaccacaccggtggcaggattaaaatgaacgacgactcccggctcttcctgttcgaaccagacctctgacgtgcggtctacataagccgaaagaatcggttgagcggacaattccttgcaggtcacgggagaataatgcgtatgtttgtttgtcttcaggttgcaaagaaagaacccgtccgaatctgttgtcactacagtgttgtcattggccacggtgtgtatggaagtaatgcgggctttcgtcggaagttcgagcagacgaaactctccgccctgtttctgataacaccagattctccccctgtcagaagcaaagcagatatcgtcttcacattcccggaccgcataaaatgcctgattcatgccgtcttgtttccctttcgtctccacaaagaagttcacgggttgctgctcaccggggcgtatcattcccaaaccgttatcagtcagcagccagtgattgccggctttgtcctgatagacctgataaaagtgatcggcaggaaacagaccggacttcgttgaataaatatctgatttcgttgtataattcttctgaggaagcgtgactacacggatagctccatcatgctctgttagcagccagaccgtaccatcgggcaatacctgaatagcgtgaatgttatatgtactaccttcttcacctgctgccggaacctgttcgaacgtctccgttttcgggtcaaaacggtggacacggttgtcataagtcaataaccacagaaagccgtaccggtcttcatacatccggtcggcacggttattggtcagactgatgtaattgccctgacgtgctttataagttttaaagttatagccatcaaaacgattgattccatcccatgtggcaaaccagaggttgtctttgtgatcctgcaacatgctcatcaccgtgttttgagacaacccatcctcggtagaataatgggtgaaaaaactgtgttgttgtgcctgcactacaggtgcggtcaggcacaaaagaattagatataagattctttttatcattattacacacatattgaatggtgtaaagataatgatttagctgaacttacatctatattcggtgtttatttaacagaatcgttctttagcggattccagccgtcttcacctgccaaaaccgtttccatctcgtagcctttcagattcttcagttgacgagagaaagctgcgcgggctttcggattggctccctcgccatgactatcgtattcggcataaaatacggttttctccgcttctttctttccccagttgtgccagccttccggaaggatatgtttccccagttcacaacggataaatacagcctgtgcatacggacgccacggacgagacagatatactttggcaacatccggatcagcagtcaaccggcaatcataaaagacatatccatactttttgccttgatctgtagagggtgccgtcacataaccatcacgtttgctatgaatatgacaacgattgaatacagctacagaccatccgaagataaagtcaaccgttccttcgatatagcaatcctcgtaatattgacggctgtgcttgccatacgtataaagggtatcctgataaccgagaaaacgacaattcttaaagaacgcacggtcggcagatacaaaacaggcaacagcctgtcctaccggtcctgccgagttttcaaaagtgatgttctccgcatagaaatcgggagcataaatgtagcaactcgacgatcccgaagttcccatattctcaccaaacacatttttcttattggcaaagtcatcatttgtcagtaccacaccatcctctcctatcagagagatatttattttggattccggaataataatcttctctttataagtgcctttacggaccaagatagtagtacgcacattcttgcgaaaatcgggtactgcatttatcgcttcctgcactgtgaagaaatcacctgttccgtcttgtgccactacgtaatcataatgacggacatattttgccagttccggtatttcctttgcgatagcatctacagtcagcccggcgatagtccgtgctccgtacacattcaaatgggtattatcctcccggcctttcggaaaagccggaactttctcaggttcgacaaacataaacaacttcttcgattctgcggggcccagtccctgcaccagatcatgggtaattttgttcatatcgataaacgccactcccatctcttttgccacattacgcggagaatcaaggtaggcaccgtgcgtatcgtacaagacgtttccttctttcggcagttcctgttcacccggagcacgacgggcatctgtagcaatcgaggcatcttccggctgtacaaaattacgacgaacgatggagttgaacaacacaggaatccctcctttagcacgagtttcattgacgaaacgacggagattgtcatcaaaggtcgttcccggatcagtatggcgtgcagaatcagccttttcatcattgtgtccgaactgaataaagacataatctcccttctttacctgggaaatcacttttgcccatcggccttcagatatgaaacttttggaactgcggccattggcggcatgattatcaacacgtatatcttctgaaaaaaatccggggagcaccatacaccagccgcgttcgggatttccaccgtacagatttttgttagccatcgtagagtcacctatcgtaaagatggtcaatacgggcttatccgcacgaaaggcggagaaaaggataaatactataaacagcaatagcagtctgtttttcataatcttattttgttggttcaaaattaaagttcccttatgacttctatttaacgtgaattcgatataaatttgagtaactcaattctcctccttccaaaaggaggggaaaccatgcggattactcttatatcgaactgatgttatttataaggataccaattactgcattccttaaatatattctgcggagtatattgcaccgcttctttatcagtcagctgtttagcccatttcacacgtccggaagcatccgcaccttcacccgtgtttttaaattcagcgtaacgggcagtcttttcgttttccggattcttccagttgtgccagccttccgaacggatatgtccgccaaactcgcaattaataaaagccgtagcagcataaggtctccaaggacgtcccagatagactttcttgataccgggagcggctgtcagcttacagttcttgaaaacataaccaaactccacctccttcggagtagaagccgcggtaatatatgaatcgcgcttgctatgcaattcgcaatattcaaacaaagctgtagaagggccgaagatgaagtctgtagttccttcaatatagcagttagtaaataacaggcggctaccctccgatcctgtataaatagtatcctgatttcccagaaaacgacagccgacaaacatcagcctgtctccttcggtatggagcgcaactgcctgccccaaaggagcggcattgttctcaatggtcagattcttaaaagtaatgtcacttccttctacctttacagtataagtgcggaaagtgcccattttattgatattggcatgatcatcatacgtgatgatcgtcttttcggcatcttcacctaccagctgcacgttcttcacccatgaaggaatcaccaatttttctttgtatataccattctttataaatatagtcaccgtataatccataaaagcacgtaccgcttccacggcttcctgaatatcccgatattttcccgttccgtctcgtgacacgactattgtgtcttgcttttgctgttgtgcacaggccaaagttcctcctgaacaaagcagaagaaacaacgccattcctttcaaaatactccttttcatcgatagaatttacttttgcaaacgttcgtattccagacttgccataataaatggtcctactgctttcgggtcgttattacggattgtttcatttatataatagtcataatcgccggaacgataaaccttccctcccagccccgctaccgcacaggctttcgttatagtcaccactccatctttatccacttcaataaaatttttcagaaaaccttcataaccagcctttgctacatccagataagacggatcgatatatcccatacgtactgccttaaacaggctgtatatgaacattgccgaacaggatgattccagataattacccttgtcaccgcttctgtccatcacctgataccatccaccggtctccggatcttgcagtttctttacctgaactgctacattatccaagattgcaagcaacgaatctcttccggcctcatgcttcggaataaaatcaagcacatctaccaacgccatcgcataccagcctaatgcacgtccccaacaatgttttgactgtcctgtcaccggatcggcccagcgctccgtgcgacttacatcacacgcatgacgataaagaccattcttcggatcatacgtatgacgggcacaggtaataaactgatttatgacgtctgcataatcctgcgggcgattattacggaaagcatattctgcataaaaaggagctcccatataaagtccgtccagccacatctgatgcggatatatctttttatgccagaatcctccgtcttcattacgaggttgtccggcaaactggctatagagcaagtctaatgccttcttatacttttcatccttggtctgctcatagatacgaaacaggatttttccggaattgatacggtccagactgtaatcggtcaatttgtatgcagtaatacttccatcctcatgcaccatcgtatctgcataagcaattgcataatctcgtattttcttgtcgccataagtatcgtatacatcaagcatcgcccccaattccagtccgtggcaatagtcccatttcagtctgggctgaaaatcaagctgccaggattccgggcaacggatcatctccgattcagtcatccgcaccgaccaaggcagtttttcatccacctgctgcgccgacagtgaaatggtgcttgacattattattactaatatcaaaaatttataaaaagagcttcgtctcatggtttattgttttaaggattatacatgctattttttcatgctacgaaagtagtgcatttcctccaaacaaagtgggattttttagttaagaaggtgtattttttgtttttcgtgcacggaaacgactaattttgtgcacgtaaacgtcaaaaatgtccatttttgatgcattaactgataaattaagagtttcgttttggaataaagcggaaaaggtcgtacttttggcacggtttacaactaataccctctggggaaacacagtaatttatcattaaaaacagagaaaaaatagaacagaatggaagaagtattcaagtacattatcggtctgggagcggcagtaatgatgccgatcattttcacaattttaggagtatgtatcggtattaaactccccaaagcgctcaaaagcggtttgttggtgggagtcggtttcgtcggcttatctgtagtcacagccttgttgaccagtagtcttggtccggcattaagtaaaatggtagaaatctacggattggaactcggtattttcgacatgggatggccttcggcagcagcagttgcttataatacctcggtcggcgctttcattatccctgtttgtctgggagtaaacctgttaatgctactgaccaaaacaacccgtactgttaatattgacctttggaactactggcacttcgcatttatcggggctatcgtatacttcgcctccgatagtattttctggggatttttcgccgctatcatttgctacattataacattggtaatggcagacatgactgctcctgcttttcagaagttctatgataagatggacggtatctctatcccgcagcctttctgccagagcttcgttccgttcgcgattgtaatcaataagcttttagataaaattccgggattcgacaaactgaatatcgactctgaaggaatgaagaagaaattcggtctgatgggtgaaccgttattcctgggtatcgtgattggttgcggtatcggagctttgggctgtgccagctggaaagaagtactggacggcattccgggtatccttggattgggtatcaaaatgggagcggttatggagttgattccacgtatcaccagccttttcattgaaggtttgaaacctatctctgatgcaacccgcgaattgatcgctaaaaaatataagagtaatacaggcctgagcatcggtatgagccctgcacttgtcatcggccacccgacaacgctggttgtatccctgcttttgatcccggttactatcttccttgcagtgatccttccgggtaaccgtttcttaccgctggcttctctggccggtatgttctacctattcccgatgattctgcctatcaccaaaggtaatgtggtgaaatcattcatcatcggactggtagcattgatcgtaggtctgtacttcgtaacagaactggcaggattcttcacgatggctgccaaagacgtatatgccgctacgggtgacccgacagtaaatatccccgccggcttcgaaggcggagcgctcgactttgcttccagcctcttctgctggggtatcttccacctgacttacagtctgaagattatcggtcctgccatcctcgtagcccttgcactgggaatggcagtctacaaccgtatccgcatgaaaagaaatgatgcgaaaaacgcagctaacgattaaatataagtataatccaaataaagattcgaaagatgaaaaaattagcaattgcaatgatgatgggtatcgcagctatgtctgcttctgcccaggtaaattacaagatgcaggtggcttgcaatccgcaagacgtgaaaacgtataatacaaaccgcctgcgtagtagcttcctgatggaaaaagtaatggttcctgatcaaatcaacgtgacttattccatgtacgaccgcctcatcttcggtggtgccgtacctgcaacaaaagaactggtacttgaaactatcgatccgctgaaagctaagtatttcctcgaacgtcgcgaactgggtgttatcaacattggcggcgaaggtatcgtaactgttgacggcaaggaatatacgctgaacttcaaagatgcattgtatgtaggcagaggcaagcagaaagttactttcaagagcaaagatgccagcaaacctgcaaaattctatatcaactccgctactgcccacaaggagtacaaaactcagttgatcaccatcgacggacgcaaaggttctctgaaagcaaattctttcgcggcaggaaagatggaagaaagcaacgaccgcgttatcaaccagctgattgttaacaacgtacttgaagaaggtccttgccaactgcaaatgggattgacagaactgaaaccgggtagtgtatggaacaccatgccggcacatactcacagtcgccgtgtggaagcatatttctacttcaacgtgccggaaggcaactccatctgccacttcatgggcgaacctcaggaagaacgcatcgtatggatgcagaacgaacaagctatcatgtcaccggaatggtctatccacgcagctgccggaaccagcaactatatgttcatctggggtatggctggtgaaaatcttgactatggcgacatggataagattaaatatacagaaatgcgctaatctttgcgcagctctttagcacatatcaagtgatccgaaaaacttcattctttcctcgaaacggggagagaatgaagttttccggatttgtcatattcttcccccaaagagaccaaattgttacgataatacattactatgtacaaataatatgtataatgcaacgaattatacatgattttgaccaattattacaaaaaaaatccagctgaaataccgacctttgtcagcaaatcaaaatctatttaaatccattatcatgaatgcatttcaaaaaacaggcgaaaaaatgacaaactacagatggacgatctgtgcgatgctattttttgctactacagttaactatctcgaccgccaggtactatcgctcacctgggatgaatttatcaaaccggaatttcactgggatgaatcacactacggtactatcacttccgtattctctattgtttacgcaatatgtatgctctttgccggtcgctttgtggactggatgggaacgaagaaaggattcctctgggctatcggcgtatggtctgccggtgcctgtctgcacgcagtctgtggtattgtaacagaagcgcaggtaggactgcacagtgctgccgaacttgccggagccaccggagacgtggtggtaaccatcgctactgtcagtatgtactgcttcctggctgcacgctgtatacttgctctcggagaagccggtaacttccccgccgctattaaagtaactgccgagtacttcccgaagaaagaccgtgcttatgctacttccatcttcaacgccggtgcttctatcggtgccttgatcgctccgctcaccattcctatccttgccaaagctttcggttgggaaatggcgtttatcgttattggtggacttggttttatctggatgggcttctgggtatttatgtatgatgctccttcaaagagcaagcacgtaaacaaagccgaacttgaatatatcgaacaagaccagaatgaggccggtgcaggtccgaaaacagaggagaaagacgagaaaaagatgagattctggcaatgtttcagctacaaacaaacttgggcatttgtcttcggtaaatttaccactgacggtgtatggtggttcttcctgttctggaccccgtcttacctgaactcccaattcggtatcaaaacttccgatcctctgggaatgggacttatcttcacgctttacgcaatcacgatgttatccatctacggtggcaagcttcctactatcttcatcaacaagaccggcatgaacccttatgcggcacgtatgaaagcaatgttgattttcgcattcttcccgttagtggtattgctggcacagccattgggaacattctctccgtggttccccgtgatcctgatcggtatcggcggagctgcccaccagtcgtggtcggctaatatcttctctacagtaggtgatatgttcccccgaacagcaattgcaagtatcaccggtatcggtggtatggccggtggtatcggttcaatgattcttcagaaagtggcaggtaacttatttgtatatgcttccggaacgacaatggttgacggcaaagaagtggaaatgacaaaagaactgctggaacaaggagcacagtttgtacaccctgcgatgacattcatgggattcgaaggaaaaccggccggctactttgtaatcttctgtgtatgcgcagtggcctacctgatcggttgggttattatgaaagcactggttcctaaatataagcctatcgtattggattaatacaatataattatatagaataaaaaacaggagggcactcagtatgagtttgtcctcctgtttttttaaccaattatttattcaaaaagttccaaaaacaaaaaagcctcttctcacgaagaaggctttttaggtttacttattcttcatagccatcctgtaccattttacaaaacaacttgcacattcaaacaatgaaggatagtaaacgttaagatgaaaaaaagggaagtctcacgacttccacaattcttctaaccttaaatctaaatctctatgaaaaaaacgtattgcaaagataggggtttgttcaacaaataggtgttaatgaattgcataaagagagaataaaaactaacgtctgcaaaaattatgcaatattccggaggctctctattaattttaataaacttttatagagtggattacgctccagcagcgccggcacacctgtcagcagcatctgttttcttgcacgtgtcaaggcaacattcagtttccggtcaatcagaattccgtcttcttctgtcagattggaaaggaatttcaactgatacggatagttcacacagaatgaataaataatcacatcgcgttcacttccctgaaaacgttctacagtatcaatcaatatctgattcagttcgggaatgccgagagcttctatttccttcttgattaaagctatctgactacgatatggagtaatgatccccaatgtgcgggaggcatcaaatgcttccgagtgttctttatagatagttgcggccagacgggcggcaatctttgcttccgaatggtttgttttagcagaagaacccatcggttcaggctgcgaaggataaaaagacagccggttgatatttccggaatcttccagttgatgcggcagtccgacaggcagcagccgaccttcatagaaagcttgattggcgaacagagccacttcggggtgcatacgtccctgacggcagagcatatcgtaagtacgatgggcatcggtatgctgacgggctgtgcgatacagtctttcaaacagagaatctttcaagttcttcagtccgacagcagatagggcttcatcatatacttccgattgctccgaattctgcaagacgacagccggaagttgtttatgatcgcctatcaggataaatttgccaacgccctctttcccgttttctcctttggcacaaagtatacccagcaactgcggttccagtatctgagtagcctcatccacaatagccacatcgaaatgcttcaatcggaaaagttccggtttgccggagatagacgctactgtaccgactaatatacgacagcggttaatacgttcgtaaacctctgtacgacgcatacaggtagcaagttcattctctatcaaatgctcccgatagttctcgtcacatgaaagctcgcttcccacacgaatgaaatctacttctggacgaatggaagaaagtgctttacagatttcatctacggcacggttagtgtatgagagcaataaaatctgagctccttcctctttataaaaggtttcgaccatcttcttcagtgcacaggacgttttaccggttcccgggggccctaccagcaggaagtaatcctttgctgcttttgcttttaaggcaatacgggtaaagtcatcggcagcttcggctatctgcttatccaatgccgcatcaaatcgcggttcccgttgagagagcagcaagtcacgacgttcttttgtagcagacataaaagcataaagtccctggtacatgctacggaaagtagtatccatcgcatcgtgctcaatagcatagaggctatcagacggaagtacggaagagttctgctgggtcgcacgcagacggatacagatttcattctcgttcagatagtcgatattgcctttgaataccatcttgttggtgacgttatccgtatccgcattccgttcgtaaagcacgatggcatcgccctgacggaagttagggagggtgtgctgcgcatcatccgccaccgttctctgaagttctccggacggcaccagcaacagatgggatttatgttcgtcggccgcgtgattctctttaattcttaaatcatagatgatctcccccgattcgcatttctccgccaaagtggaaagccataaggaagcggctcctgtacgtccctcataatccacatcaccggacttggacgtataaagttccttcgttataaaattatagagtgcatagaagtagcttttctctaaagcggagagggacttcaacttctcctgaaaattatcgatagaaggacgcagatacgtttcccaaaaacgtcccgacaatccccgctcgtttagtaccgaggcttttatttcttccagtttctgtgccgtatattccaggctgttccgcaactggatgccatattcatccgctacaatccggttacgcagatcgatcacacggcggaccattgcccatgaaggacgggaaggataaagcaacggatagcgtgtatagagcagataagcctttaccttccggtgatccatccccatcgaatattgcagaactgcctgataaagcaacatctgcaccttattattctctttcggttctacttttccgcgaatcgcatattcgtcagcctttcccgatttcatttcgatgaaagaagacatatcgcgctgcatatagtcgagccgcccttgcagaccgagcgcttcacatatataagaaggttcgagcacggcatccgtcttgtccagttcgtagccggcggcatgaaaagtatcattcaccgtctcacggatatgatcaaaatggagtttgcagtcatcaaagaactgacgttccttctcccgatcacgcaggtcggcacaagcagccagttcaatcggataacgccggaaagctttctgcatacatttcagataatccacctccccttccgcatgtatccactcatcgaggaaaaggttggctatatttcctaaaagcaacgggcgtgcattctctatcggctgaagacgggaaaggaaatagtttgccggatgatgtccataatcacggtaacattctgccaatgaactgatatcaatcagataatccggttcaaggacaatgaacgaaggggtcagagttccagcttcgtcaacagcgacatccagcaagttgagttgtgcatggcgccagagcaactgacaggtttccgcaaattcttcattgatctgaggtatattgtaacggacacgtaatggttcgtcggctatttcatccaaaggagtcacatacagataccgctcgtcggaatattggaaacagacgcgcatccgctgcacctgcttgtgtgccggaggagccacgatataagttgcatccgtccggggaagcaaacgatacagctcctgtggaatatcttcctcaaaaagtttacggatgaagaaagccagcgttttcgcatcccgcagaaggtgttcgcgggtaggttcctgttgtcggttcagaatggcattggaggtcagtcggaaggtatgcagtctgttttgctccgctacagaaagccccactttggccgctacaaaactaattcgtgcggaaagatcggtcatctgcagactaccgttgtgcatatgtaggcggcaaagcctttccagcaagtcgcgcatctgtttgtagccaatagtcagctgcaaatgatccgccttacaaacggctaaaagaatttcataagattctcttcctttattttccatacgacaaaagggatattataaaaattacatgtgtgtgtcaaaagtcagcctcaattgagttactatcgacttttgacacacacttggggaaacgaacgataaataattggcttatcagacttttgccacgccttcttcttcctcttcttccaactcaggaacttccttcttatcctttatcatcagaatactcatttcgtagagcagataaagcggaatagctacaacactcagtgtgaacggatcgcccgtcggagtgatgatagcggcagctattacgataatgacaactgcgtgacggcgatatttgcgcaggaaagacttgttgacgactcccagcaaagacaacaaccaagtcaccagcggaagctcaaaagccagtcccatacagagaatcagcatcataaagttatcgatatacgaattgagcgacaggatattctcgacttccgaactcagctgataggtagagaggaaacggagtgtcagcggatataccataaagtatcccataagcaccccgataaagaacataccggttcctatggtcaacgctttcctcactcctttccgctcattcggataaagagccggattgataaaacgccagacctcaaagaaaatatagggcatagccgtcactaccgacatccagaaagctgtcgacatatgtataaagaaaggagctgccaaattgatattgacaagcttcaccttaaactcctgcgtaaaaaattcatcagtcaaatcgaatttctgaccgataaagcgtagtaagtcgtaaaatacaaaatcattatggcaaggcgccagtattacatggtcgaacaaataaggcatcgctacgaaatagccgattgccaatacaaaccagactccgataacacgaaaaagtacccgacgcaactcatccaaatgatcccagaaggtcatttctgccattgcttattatttcttagctgaatctgccgatgcgtcgatttcgtcttttgccttattgatttcttcttttgcctcgttcacaccatctttaaagctctttactcctttgcctaagccacgcatcagttcgggtatcttcttaccaccgaaaaggagaagaataacaagagcaataatgatccattcagagccactaggcaaaaagcctaataataataagtttgtcatatgtttattaattatagaggtttattagttggtgcaaatataaagaaaaacggcagactataaaagaaaaacaggaaactataaacgggaaacgggaaataatttaagtatacccgttatcatttaccgcccatttacccatcgttaacctttatagtcttccattcactattctactacatataattctgtttttaccgcctgtgctttagtcctgatagtagactcgcttcacacggttcgagatgctggtcagcacttcgtaagggatcgtccccaacttatccgaaagtgtggttatcggcaggtcgtcaccaaagataacagctttgtccccttccctgcaatcgatatccgtcacgtcaatcatacagacatccatacaaatatttcctacatagggagctttcttgccattcaccagacagtaagcattgccacgtcccagatggcggttcaagccgtcggcataaccgatgggaattgccgcaatgcgggaaggacgcgtcagatgtcccatccggctatagcctaccgtatcttctccgggcacgtcccgaatctgaagaatcgtagtcttaagcgtgcttacattattgataatcgaattgtcaatcgggctcaccccatagagtcctattcccaagcgcaccatatcaaactgcgcaccggggaaacgttcaatgccggctgtattgcagatgtgacgcagaatcttgtgtgagaaggcttcctgcaattcctgcgaacctttctcgaacagttcaatctgctggcgggtgaagaagtcgaattgcgccgaatcacttcccacaaaatgtgagaataccgatcggggaataaccgcattctgacttttgagacgacggatcaacaacggaatttcatcgacggaaaaaccaagacggtgcatacccgtatccagcttgacatgaatcgggaagttggtgattccttctttctcggctgccttaatcagtgcgtcgagcaaatggaagttgtacacttccggttcgagtttataatcgaacatcgttttgaacgatgtcagttcggggtccatgatgataatggaggaggtgatgcctgctttacgcagttcggagccttcgtcggcaacggctacagcaaggtaatccacatgatgctcctgcaatgttttggcaatctcgtatgatccggctccgtaggcagcagccttcaccatacagatcattttcgtctccggatggcggagcatggagcgatagtgattcagattggcaatcatcgcacccaagttcacttccagaatcgtttcatgcactttcagttccagctcttccgataccagatcaaagttgaatacgcgggaaccttttatcagaatgacttccgagtgaagggatttgaaaatgcccgatcttagcaaggcgtctgtatcggggaagaagtatcgttccggcgtaccttcgaagcgagcggcacacgaagaaatctccgctcctacaccgatcagcttgttgatgccccgactctttatcagttgtgccacccggcggtaaagcgtagctgtgctctgccctgtctccaaaatatccgataagataagtgtccgtttcagtcctttcttttccgaacggcgtaccaggaaatccagtgctatatccagagaagccaagtccgaattgtagctatcgttgatgagtatacaattattcttgccttcttttacttccaggcgcatggcgatcggttcgagccgtgccatccgttcggtaatctgatcggcaggagtcatcagataaagacaggctgccaggcagttcaacgcattttcgatggaagcatcgtctataaaaggaatacagaagatattatccatatccagatagcggtaagcaatcacagtatggtcttctttctttgtcaccttgctgatataaagagggcgctcgatatccttgcagctccatgcaatctcacgggctgtcagcatcgactttgccacacaattactgatcagctcgttatctccattatagatcaccacatcgcaatctttaaagagtgtcagcttctccatacatttctcctgcaatgagaagaaattctcctgatgggcaccgcctatattagtcagaataccgatagtcggtttaatcatgcgcttcaaggcccccatctcccccatttcggagataccggcttcgaagatgcccaattcggcttcttcgttcagttgccagacggacaagggaacgccgatctgagaattataactgcggggcgaacggacaatgcaacggtccggactcaataattgatgcaaccattctttcacaatggtctttccattactgcccgtgataccaattaccggaatcttgaaattttcccgatgagcttcggcaagtttctgcaaagccttcagaggattcgccacgatcaagaaattggagaaattgagaatggaaagtggagagttgggagtgggctgcgcaccatcctgctgcatagcattctccattttccattctccattctccattctcttaaagtcttcttccgtaaccacgaagttgcgcactccccgatcatatagttcggggatatagcatgcaccgttattacgtttggtgggcaaagcaaagaaaagggtttcttccggaaagctcaaagagcggctatctgtaagtagccaatcaatcgtcgcttcatgctctccgacacggcgtgcaccgatatattcggctatggattcaatcgtatatgacatagttctgtttctttttgaaagtctaagtacgggtattttccgttaagtcgttcgatttttaacactatttgtcctaaaaagcgttgatacgcttccgactccggatgaaaaggcttgtgtgacaagtctttagtaatatcttcgatggcagtgatcacctgcttcgtttcggcagaaaagaaggcctccgaaaagcgttcccacaaataacggacagccaacggagacggatgaagcatgtcatcggcataatagcgataatcacgcagttcatccaaaacgatctcataagaaggaaagtagaacacatgatccggaaagagctgttgcaggcggtcgatggcaagcaataaggtcgatttactcaactggttggcatgcatcccgtcacgtatatgccggatagggctgaccgtgaacaagaccttcaactgagaattgcgcgccaccatactggttatcaacgaagtatattcgttcacaatctcatctaccgaaagaatccggcggttgaagcagctctccggcagtttatgacaattggagactacctgccttgtttctttctgttcatatacataggcagtgccgaaagtcagcatcagccagtcaagttcgtggaccgaacggtgggcctgcgacaagcgagtgtttatcttttcaagtacttcctccggcgatgacgcagagaacaaaccatgatgcatcggactatgccagcactccttatataggaataagtctttctcctgatacaccttccccttcaatatctccaccaaagccgtagagaccgacagcggattatagagaatcccgaaaggattcatgtcaacgcgaaatttattttctgccagcaacctgcccatgttctctgcaaaacaagaccccatcaaaagaatccgttccgcatgactgacaggcggcaagcccgccggtagttctacctttgtttgaaaatccatatattctccttctttcgattgtttctctcttgcaaaagtacgacaaagatacgatattccgctttattttaatcacaaatctattcaaggcttgacaaatggctttttatgttgtatatttgtagaccgaaaacagaaaatcaatgaataacggatataaaagaatagaaaacatggataaaatacagtatcatattacaacaaatacagcttattccttctcattttactaaggaataagacgattgatatagcccaaaggctgcaagctctatgaagtttgcagccttttttgttgcattaattcaatctatttcctacaaaatctcattttagagtttctaataaacggaagacacgtctataataaacgatcatcaaatttattaataacgatacgaacgtttctgcaagttcatgttctcttttttcatgcaacttttatttccctaatagagatttcatttgattagtaatattaatccacatttcacataataaaaagaaagttacagttcttccgggaacccgacggcacatacttcaatataccaacgaccgaatgccattccaccctcgtacttcgctttaacaataagaatttaggtaaaaagaaagggcttccgctttctttttcgtatttttgcaccaaattttctcgaatcatgaagaatgaaccgatatataacttgctaaactcaatcaacagccccgatgatctgcgccgtctggaagtagaccaactgccggaagtatgcgatgaattaaggcaagacattattaaagaactctcctgcaatccggggcacttcgctgccagcctcggaacagtggaactgaccgtagccctgcactacgtctacaatacaccttatgaccgtattgtatgggacgtgggacatcaggcgtacggccacaaaatcctcacaggacggcgtgaagcattctccaccaaccggaaactgggaggtattcgccccttcccttctcccgaagagagcgaatacgatacatttacctgcggacacgcttccaattcgatctccgcagccctcggcatggctgtcgccgccgccaagaagggagacgaccaacgtcatgtgatagccatcatcggagacggttcgatgagcggaggactggcttttgaaggattgaacaattcttctaccaccccgaacaacctgcttattatcctgaatgataacgacatggctatcgaccgcagtgtcggcggtatgaaacaatacctgttcaacctgacaacctcgaaccgctacaaccaactgcgtttcaaggcttcccgcctgttgttcaagctcggcatcctgaacgatgaacgtcgcaaggcactgatccgcttcggcaacagtctgaagtcaatggccgcccagcaacagaatatattcgaaggaatgaacatccgctacttcggtcctatcgatggccatgacataaagaacctttcaagggtattgcgtgacattaaagacctcaaaggtcccaaaatactgcatctccacacgatcaaaggaaaaggcttcgcccctgccgagaaacacgccaccgaatggcacgctcccggcaagttcgatcccgtcaccggagagcgtttcgtagccaatacggaaggaatgcctcccctgttccaagacgttttcggaaatacactggtggaactggcggaagccaatccaaggatcgtaggtgtgactcccgccatgccttccggctgttcgatgaacatcctcatgtccaaaatgcccaagcgggctttcgatgtgggtattgccgaaggccacgccgtcaccttctccggaggaatggcaaaagatggcttgcagcctttctgcaacatctattcatcgttcatgcaacgggcttatgacaatattatccatgatgtggctattcagaatcttcccgtagttctctgtctcgaccgtgccggactggtaggcgaagacggtccgacacatcacggtgcgttcgacatggcttatctgcgtccgatacctaatctgaccatcgcctcccctatgaatgagcatgagctgcgacgactgatgtacacggcacaactgccggataaaggtccgttcgtactccgctatccgcgtggccgtggcgtattggtggactggaaatgcccgcttgaagaaattcctgtaggcaaaggacggaaattgaaggacggaaaagatatagctgtcatcagcataggacctatcggaaataaagcaaggagtgccatcgcccgtgccgagtccgaatcgggaagaagcatcgcccactatgatctgagattcctcaaaccgctggacgaagaactgctgcacgaagtgggccgcacattccgccacatcgtcaccatagaagacggaacgattcagggaggaatgggaagtgccgtacttgaattcatggccgaccatgaatataccccgacagtcaaacgcatcggaattccggataaattcgtgcaacacggcacggtagccgagttatatcagctctgcggaatggatgaagacagcctgacaaaagaattgctgaagcaatgtgaacttctgcccgacatgagcaaaataaaagaattaactaactgaagatgaagataattatcgcaggtgccggaaacgtaggcacccacctggctaaattattgtcccgggaaaaacaggacattatcctgatggacgatgacgaagaaaaactaagtgccctcagcgccaacttcgatttgttgactgtcacggcttctccttcttccatctcgggactgaaagaggtaggcgtgaaagaagcggacttgttcatcgcagtcacccccgacgaaagcaggaatatgactgcctgtatgctagccaccaatctgggtgccaaaaagactgtcgcccgcatcgacaactacgaatatcttctgcccaaaaacaaggaattcttccggaaactgggtgtagactcattgatctatccggaaatgcttgctgccaaagaaatcgtatcttccatgcgtatgagctgggtacgtcaatggtgggaattctgcggaggcgccttgatactgatcggtaccaagatgcgcgaaaaagcggaaatactgaatattcccctccatcaactgggtgcaccggacatcccttaccacgtggtagccatcaaacgcggaacggaaaccatcattccgcgcggagacgatgttatcaaactgcacgatattgtttatttcaccactacacgcaaatatattccttatatccggaaaatagccggcaaggaggattatgccgatgtacgcaacgtcatgatcatgggcggaagccgtatcgccgtccgtaccgctcagtacgtgccggattatatgcaggtaaaaattgtagataacgacatcaaccgttgcaaccggctgactgaattattggacgacaaaaccatgatcatcaacggcgatggtcgtgatatggacctgctcatcgaagaaggtttaaagaataccgaagcatttgtcgccttgacggacaattcggaaacgaacatcctcgcctgtctcgccgccaaacgtatgggagtggaaaagacggtggcggaagtagagaatatcgactatatcggcatggcggaaagtcttgatatcggcacggtcatcaataagaaaatgattgccgccagccacatttatcagatgatgctggatgccgatgtatccaatgtcaaatgcctgacgtttgccaacgccgatgtggctgaatttaccgtacccgccggagcaaagattactaaaaatttaatcaaggatctgggattgcccaaaggaacaaccatcggaggtatgattcgcaatggcgaaggagtgctcgtaaccggagatacgctgattcgtcccggagaccatgtcgttgtattctgcctgagtatgatgatcaagaagattgagaagttctttaattaagtaataggtattaggtaataggtaataaccgtagcagcttgtacttgacattatatctgatacttggcgcataatacttaatacttaatacctattacttattacttaatacctattacttaaaaaatgattaattcgaggatgatatatcgcatcatggggtttctgttactgatagaaacggctatgttaatgtgttgcggtggtgtttcactattttacaaggaagatgatttaaacagttttctgctttcatcagctatcacggcctttgtaggtgtgattatgcttgctattggaagaggggccgaaaagtcactcaaccgccgcgatggatatgtgattgtcagtgtagcctggattgctttctccttttttggaatgttgccctattatataggcgggtatattccaagtgtcaccgatgccttcttcgagacaatgtccggcttcagcagtaccggtgccaccatcatgaataatatagaatcgatgcctcacggaatccttttctggcgggcaatgactcagtggatcggcggtctgggaattgtattctttacgattgccgttcttccgattttcggtatgggaggtattcaggtatttgccgccgaagccagcgggccgactcatgacaaagtacatccccgtattggtgttaccgccaaatggatctggggcatctatgccggtatgacggggacattgattatattactggtattcgggggcatgggacttttcgacagtatctgccacgctttcaccacgaccagtacaggtgggttctccaccaagcagacaagtatcgaatattaccactcgccttacatagactatgtaatatctgttttcatgttcctctcgggagtcaacttcacgctattattgctgatgttcaatgggaaaataaagaagtttatccatgatgccgagctgaagttttattttatgtctgttgcctttttcacggttttcatagcagtctggctttatcagaccagttcaatgggagcagaagaagcattccggaaatctctgttccaagtaatctccttacagacttcaaccggttttgccactgccgactatatgctctggccttccattctctggggctgtcttcttatcgtaatgataatgggtgcttgcgcaggcagtacgacaggtggtatcaaatgtatccgcatggttatcctcttcaaagttgccaaaaatgaatttaaacatattctgcatcccaatgcagtattgcccgtacgggtgaataaacaggtgatctccccctctatccagtctaccgtactggcatttacatttttgtatgcaatcatcgccattatcagcattcttgtcatgatgggcttcggagtgggatttctcgaatctatcggaacggtcatatcaagtataggaaacatgggaccgggactcggcacgtgtggccctgccttctcgtggagtgaattgcctgatgcagccaaatggttgctctcctttctgatgcttctcggacgtctggagttgtttacggtattgctgctgttcagttccgatttctggaaaagaaattaaatcaaatatcatacataaaaaaggtgccgactattagccggcaccaccatacaccaattcaaacctttcttatctaaagaaatattatatttttctcagaacaatctttcttactactggcttgttgatttcgtagatcttggaaatcagaacatccatctcttgttcacgtgcgtcgcgaatttctttaaacatcatctttgaataaagatcccgacgtcctttcaaccacatgttcttctctacattttcatccatcacttcaatagcctttctgtcattagcaaacaataagcctttttgttgaaagaaaccaaactggcaccacgcatattctctaaatgttctttcaagttcccaacgatactcattgaggtgcatgatagttaatgcctgctggtattgtggagttttagattctgcagctaaatttataccctttgccaaatctgcagcatcccaggttcctatttcctgatcgtcaatcaacagtttatattgccccttcaaaccggtaactttcagcaattcagtattcatctcttccataaaaggaacttcttttataacttctgcctgactcttcttagaaccccagcctcgtgcaatagtatccaaaggatatggtaacgcctctgccagataatcaaaactaatatctttacctattttcttaatatttgagatggtacaaccttctgccttcactgcttgcttcttatttgcattgatttccatgttggccacatctttaccagcaaaaccttgtgctttcaagaaaagataagccatcaccatatgaccgtcattgtccggatggatacgatcgttaccacaaagagtaaaactaggatctttttgttgaagttcctgatttatagctaccataggcgcattccaatctgtaaattcccaaccatttcttgcagcagattctctttgatattctataattctcttaatagtctcattttttttcttaaagaccgtattatcctttatttgcgcagtttcatcataaggagaagttcccgtcattacgatacgagtatgtggcaattccttgaaacgtttttccatctgctggaagttcttgatgctttcctgatacttctgctcaccaaattctttcgcattatcaccattatattcataataaccggaatcattcataccgaaagtcaccatcaatacagtaggatttttgctaaaaatgtcaccatccaaacgtttattcatatcatacgctgtatcaccaccaatacctccattgaatacacgaataggcatattcgggaagcgggtcatgtaatacaaccagataaatgaatggtaacgaccaccatccgtaatactatttcctaaaaacacagctctgtcaccttccttaaaaggtttcacggtctgagcaaacgcagtagtatatgccatgcaaactgctgcaactaatactaaaaactttttcatgttatcaatctatattttacaaatactgttaatctactatgagggataatttaatagtataaactaaaaaatttatcaccatctactttctttttattttaaattcttcattttaaaataagaaaactctgccggtacatccttatctccataatgtagtaatcctggacgctgcactctatcccaacgaatcaaggatttacccttgaaaggggtattctgcacagattgccatgtttttccatccagacttttataaaagtggaatatacacccctgttcaacttccaatttcaaatatatctctttacttgcaaaagctgaatcataaagtactgactcaatatcgtctttcaccactttcaaaataagtttatctccttcaattccccaagcaatcaggtttttatcatcgccatacaaggtcaatcctttcagtcctttgcctgtgttcattactttcgtctcacagctatactgtggagattgaggacgtaaacataatgctgtaccatatttattgttattctttggagtaccggataaaaataactttcctttctttagcacagcgtgtatatctgaataaggataattccacgtccaatcaactttcaattgattccccttaaaattatcttcaaaatccgaaagaggctcttgctttgtaccgacaaaaggtataggctgttcagctatagccaaattcccagtcttgaaacgcacccaatgatcatccgtcatttccatttcttgcaaaatcggttgacgcccgataaagaaaccatctcccttcaaataagcgtgacacatataaaacatacgaccatcagatgttctcaccacagtaccatgaccacatgatttataatctccttctccgccatgaagaatggggtttccaggatatttttcgtaaggtccaccataattccttgcacgtgctacatacacatcatagtcactagaaggaccacaacatccatgggcagcgtatactatataatagtagtcgccttctttaaaatggtactgtccttccataccgattcccttttcatctactaaaagagtaaaaggttcaccatccaaatgcaaaccatcagcggacagtttacatcctaacaattctatcggacgcgtatccaaaccataagctttccaactgatatacaactgcccgttatcatcataaataaatgcatcgatagcttcctttccatactctacaatcggaccatgatcggtaaattcatgtaaaggagaatcagacgtagctactccgatatatgatatcccggtacttttttggcgggcagtataataacagtaaactttattattatgataaaacaattctggtgcccaaaatgaattagaagtccaggacggttgcttggtaaaaacatgccctacctgtttccagtttaccagatccttcgaggtaaacattggataaaaaggcgcccattccgaagaggtacccgtagcataatatgtattttcaatccgaatgacggaaggatcgggtacatctccccgaatcacaggattagtaaaatagcttttttcttgcgctactatttgtagcgcaagaaaaatactaaacagagagagtcctatcttcttcatggaatatttctttattttttagacgggtcatatacggcaactgctacacgcgaatcagcacagccataatacaagaaccatttttgattgtggaatacaagtccttcaataaatactgttccagcaggatattgtccgctcttctcaaaatcggactccggcacgtagaatggtttatccagacggtcgatcaacttagtcggatcttttgcatcaaacaatgcttgtccggcgcaataagaatttgctgtataaagtgtatcgccttctgcaccggctttatttttgccattgtacattaacagaatccctttatcggtgatgatagctggaggaccacattccgtcaaggagctatcgaacttgccacctcgtggagtaattactttcaagaggtcaccgttctcatccaacatcggttcccagttgaccagatctgtagaagttgctacgttcacaaacttttctccccaatacacccaatattttccatcaattttagcaatcacttgtttaccatctaccaattttgtaacaatagaagctgatttggaaaattcatcaaaaaaacgtccgccatatgcttttgcaaaagccggaccatatttttcccatatctgaagatcacgagaagtagctacggcaagacgggcctgcttacgattccattgtgtataaagcattacataaaggccatcctctgtcacagcaactcgcggatcttcacacccccctggccattccaattctttctggttatcatctgccggataaaatacaggaacagtcatccggttaaaatgcaaaccatcatcagaataagcataccctaagcgagaagtgcgtgaaccaattcctaccgccgaattatcttccgcccgataaagtactactacttttccatcgtaaatggtagctgccggattgaaagtatcacttgcttcccaagcaacagaatcctgtctcatcggacaataaaatacagtagatgtatccggtgaaatgatcggattaactcccgcaggacgttgaaattcggtccatgcccaatcggggaattctgttgtttgctgctgtttctctacacacgaagttgctaatgcggcaacaatcagtaaatagcttatatttttaaagtttctcttcattgtgggtaagagtttattgttgaacttgaattattgaattaaagattaagggaaagaaggtggaacaactttagtaccccatttcatgtcaggcttgctcgaagtgacatactctatcgtagcgccattactcagcagatcccaatcaatccatgtactttcgtaaagcttgccgtccagcttcatggatttgatatagatgtttttctctgatccgcccttaataacgatattaccttttttgaggtgtatcttcacggatgagaaaataggtgtattgactgtaaagccacccacaccgggaatttcgggataaagtccaatacaagcaaatacgtaccatgctcccatggtgcccaaatcgtcgtttccgggtaatccgtcaatcttgcttgaatattgctcattcaagactctattaacaatcgcttgcgctttatacggacgaccgatccagttgtacacccaaggaatatggaaactcggttcattgccggaagcaaaccaagcatcattatatcctgcatccagacgaaggaagaaatcatccaaacgtttttcagcttcttctttaccaccaataatatcgaccaaacctgcaatgtcgtatggcaccatccagaaataattcttatatgtcgactcacggaagtcttcacctaacgacttccatgacccgtcgggattgcgtgattgcagccaacccgtttccggattatataaattcttccatgaacgggcaaagtggaaataacgccaactggcaaactcgtgtcctacagcatacaaggcaaaccgtccgatggcaaaatcggcagaagtatattccagttggatagaggcattatagtatcctttatcaagatattgtctcaatcccggacgagtttctatgtcttgtgacttcgagccgggttcttcggcaccttttctcatgatctcgaaaatcggcttcgggtcataattacgtgcaccgaaagcataggcattcgctatcagaatcggagtaggatctccctgcatcactcccgtttcaatgtttgccatcacccaacgaggaaaagagccacccgactgttcggcaaataattgatgagagattacgatatcagaagccgtctccggatcaagcatcgacaacaattgtatttgcgtacgataggtatcccagttgctgaaagaggtataatgcttggaacgggttttatgtactctgaaatcggctcccatatactcgccattcacgtcgctacatacattgggatgagcaaatgaacgatacaaatgagtgtaaaattgagtaattcggtccggattggttccttctacctccatcatacccagataatgattccatttagcttccgcttgattttgtattttcttaaagtcccatcctgcattctccgctttcaagttttcacgagcattatcaatagaaacgtaggaaacacctattttatattggacgtttttctttttactcacgtcgaatgtaaaatagacgcccgagtattcgccttctgcaaaagtagagttgggcttaagttcatttcttttccatattcccgattcaacagcatcggtatcaaattcagctacgaaataaactttatagggagtaaggagaccacaaaagtttccgccttcggcataaccttcacatttgttgggtgctgtgatcactacggcagcttgctctatcggagtagctgaaagaccgccacctatgatgaccgtgccgaattgctggtctgccggatattcataatctgccatacccgttctctcggtcactgtcaactgtgctttgatatcttcctgtaccatcgtctcataatagccagcatgccctttctcttctgacagattgattcgataatccaatatgttattgggggataccttcaactttcctttgacggggaaggtggggaaattccccatgtgttcacaccccgcaccactcaactgattgatgacaaatccggagcttttggaaaaataggaaggggtaaactgcaccattccataaggataagtagcccccggataaagatatccggaggtgagaccaacaccttttgtcccaatcaatgtattaactttagaggcgtaatcgcctgtagaagtctgcgctgcaattgatcctgctacgaaagcaaatgcaaataacagactaaataaaaaattatgcttcattcttaatattctttattgtattacctgtcagacttgatcgttcttcattacttgtcttttttagataacgagaagggagccgcatacttagtagtacatctttccttattaggctgactacccatctcaaacttcaacacgccaccatctgaaatatcattgtagcgaataaagttcttatccaaaagtctgccgttcaatgtagctgactgaatgtacaagttctctttactattctcaggagcttcaatcacaaatttattaccgttttccaacgtaatggtagctttcttaaataacggactaccgataacgtactcatccgtgcccggacaaacggcataaatgcccaatgaactcaagatataccacgaagacataccaccttggtcctcgtctcccggataacctttctctgtcgaattatacaatctttccactatctgacgtacccaatactgcgttttccaaggttgaccggcatagcaatataaataaggcatgtgctgaatcggttggtttccgtgagcatactgtcccatatttgccagttccatttctttcatttcatggatgatcccgccgtaagttcccggtttaatcgtaccaggcaaagagaacacagaatctatcttagtcgtaaacttctcatcatctccaaacaaatcaatcagaccttgtacatcatggaatacagaccatgtgtaatgccaagcattaccttcacagaaaggtccgccccactccaacggatcaaacggttcctgccatttaccatctacccctttaccacgcataaagccgatagacttatcaaatacgtttctataattatacatttggcgagcaaagacttcctgataatgcttattaccgatcattttagctaattgatatccgcaaaaatcatcgtatgcatattccatcgtctgagcgcttgatcccattgattgcggataaggtacatatcctagttggaaatattctttccagaatccacgtccgttggcacctccccaaggacctttgttcattgcttcgtgagcgtatgcctccaacgctttttccggatcgaaatcgcgaatgcctttagcccatgcatctgccaacaatgagatagagtgattgcccagcatacctccggtttcacccggtgaagaccatgaaggcaaccagccgcattgttcctgtgcagcaagaagtgcattcatatagcgtccttgcaacgtaggatgaaggatattcgtcaacgggaactgtgaacggaatgtatcccagaaaccattatcggtatacatatagccgtcataaattttaccattataaggactgtaataatacggatcaccattgtctttacgttcgtaaaacttacgagagaataagttagcacggaaaaggcaagagtagaaagtcttcatctgttcgtctgtacagccttctaccacaattctgttcagcacttcattccatgtcttctgaccgcgaattttggttgcttccaattttttatccttacccaattctttgtttaaagtaaccaaagcctgttcggcactgatgtaagaagaggccgcctttgcctgtactttcgatccttttttgaatttgataaaagcaccatatccttttccggcaccatcaacttttttcgggaatacttcatctttctgattttcccatgtaccatagtcttcgaatggtttatcgaactggactacgaagtaattgcggaaggatttcgaatcgttcacaaaacgctgattattcacccaacctgagatttgtcttttctccgggtcgatatttatctcactcatagccgtatatccatcaagcaccaaatatgcatctccggtaacaggatatgagaaacgtaaatggacgccacgggtagttggagccatctcggtagtgatgccattatcaaatgtcaccttataataatgaggcttcgcaatttcattggcgtgactgaatttagtagcacgcgcatcttgattaactaccagttctcctaccatcggcatgaatgaatatactgcataatcgctcacccatggactacattgatgagactggctgaaagcacgtattttatcggaagcatacagatacttgaatccattcccattcttaccagtctgcgcagaccacatatgcatgccataaggcatacctgtcgtaggataagtatttccatagctcaagccaaaattagaatcggtgccctgcaatgtattcacatactgcaccaagtccttcagctgagcattcattccagctgaatacaacaaaaagataattaaataaactagtttcttcatggattaatgttgaatatataattagtaagttttatcttctatcttatgacgaacaaatataggataaccactaaaataagctcttaaaaaagtaaaagagaataatgttttagtcgcaaacattattctctttttaaaggtctgttggttatttagaaacttaactgaactccaaaattcacgactcgttgattcatataagcatcacctgctgtattggttttaatttcgggatcttgctgatatttatcataacttgtccatgtaaacagattatatgcattaacatagaaacggatattatcaacaaacttaggtaacacagttttaggaagctgataacccaaatctattgtcttcagtcggatataccaagcattaattaaccagaaatcagacatataagtactagcactattaattgttgaaggattgcttgttaaacgtgggaattcaataccctcgcccttttcatatttctcctgcgtccaacgtttctgatgtattggttggaattgacttttaaatgattcgatacctgtaccattgatagcaaagctataatcaaatgatccttgaaatagcacattaaagctaaaccctttccagtatccaccaaaagaccatcccagtgttgtagaaggcaagtttggcttaccaatagcacctttatcaaaatcatcaatagttccatcattatttaaatcagcatacttcaagtcaccagcttgaacaggaatatctgtataaggaacagctggagcatcctttgcacctgattgtatttttactatatcctcaggtgtataataaccaacccatttatacccaaacggctgatttaatggtttacctgtttctgccaaccaagaatatttttgctgagcttctgctttgtattttactttgttttttgcataagaaaatactacatttgtattgaaatcaaaatttccaaaacgatcctgatagctaatttgcccgtcaaaaccctgatttatagtttcggctatattattcggagaatgacctatacctataattaccgggatatcgcctcttgaaactaattgatcatatcgtttatcatgaaagtaatcaactgttagtgaaatcttatcaaataaattcatatccaacccaacatcaaatttcttcgctttctcccaagttacatgtggagtacctaaatcaccttctttataggagggagtttgccctggataatcaccaaaataataaccatctccagtttgatatacttgattatacaaatatctattaccggatgttacatccgaaccaacaacaccgtaagaagccctaacttttaacaattgaatattcttttctaaccaatctacatccttaaaaaaactttcttctgaaatagcataaccaacaccgacagcggggaaaaatccaaaacgattatcccgtccaaaacggtccgtcccattatatgccatattcacatctagtaaatatttacttttatatttataccctaacgttaaagtatatccttcaaaatttgctggaacaccaccaactgcaccatctttctcattagttgtactctgacggttataaaggaacattgaacttatatcatgatcttcgttgaaaacacgagcataattcaatgatgcctgaatattcaagtctttcgtagccttctcagtaccgcttgttatagcatacgtaccatattcatacacattattaggattaatagtatatacatccgtagacgaattatagcgataagtaggataacttgaccgatgtgcttgacgattattctcatctatacttgaataagctagacgaaaatttgccgcaagtccttgtgtaaggaaatccattttccaagtagccccatacaagatattgttatcattacggcgtgtacgtttgtatccttcatttgctaaccgtgcatttagcgttggtttatatccttcagtatcacttaaataagcataagtaccattaggattcataacaggagccgaataaggatgcatttttgaaaaatcatatatttctcctgttgcattcatattacaaggctcattaatgttcataaatctcgatgaaacatccaagcgcatattcaaattgtctgttacatcaaaatctatattggtacgataattgaaacgccgataaaaataatttgaattaacaccgttatctttgctaccgaagtctttaaccattccattttgtgaaaagtatccagcagaaacaaaatacttcaatctctttgaaccaccagaaatatcaacatttacattttcctgaaaagcgatctttttgaagatttcatcataccaattaacgtcaggatgaccataaggatctgtatgatctcggaaagcaatcagatcactttcatcaaattgcggttgcataccatcattagcataagcttcattaactaactgggctgtttcaaaagaattcaagaatttaggagtacgaacaggagtttgtataccactttctaaacgcacgttgatttgaggttttccttcaagacctcttcgtgttttaacaactaatacaccgtttgcccctttaataccgtagatagctgttgtagaagcatccttcaatattgaaatactctcaatctcattcacattaatctgtgataactgctcgtaggtatattgcacatcatcaacaataatcaatggtttattgccatcatcattcaaagaacttactcctcgaataaaaaagtcagaagcatctttacctggctgcccagaagtttgctggctgaaaaagcccggcaatttccctgttaatgcattttgtaaattactagttggaacattacgaatttctcgtgcttgtattccacttacagcacctgtcagtgttatacgttttgcctttccataagcaactaccaccacctcatctaaacttgtttggtctggtgtcaattccacatttaaatcacgctgagcattgattttaacttcatactttttgaagccaacataagtgaactcaagtatttcacctttatttacttgcagctgataattaccgtcaaaatcagtaatagtaccaattgttgcatcctttacttttacatttactcccggaagtaattcaccatcggtagaagaaaccttaccttttactgtcaacgactgtccgaaggccaatgtaaacagatttatacttaataatattaataatagtcttttcatatcatattaccaattcgggttttgaaccatgtttttattcttattaacttctgaatatggaatcggatagaagtaacgttttatatcgaatatcgtagatagcacatctatttcattataagttaacgaacttccactaacttgaatagccaatccttttagaggacttttgaatatatcctcagcgattctccaacggcgaatatcccaatagcgttgttcttcaaatgccatctctatacgacgctcgttttggataacactacgcatctcagcctgtgacatagattttttcagaccatacatttcatcatcacccggttcaattcctacccgttttctcaaactaataatagcattataaacatcatcagaaggagatgacagatattcattcaaagcttcagcataattcagtaaaacctctccataacgatacattacccataaatgaagcatatcaccatcataatccgttctatttgcatcatatttccccataaacttacacatataataactcgtttgactatattgcgcaccgcttgggttatgagttcccccctgatatgtctcaagttgttttcctaaccaagtggaaccattatgtaatattgtataattcaaacgtgcatcacgatccacatacggattattcatcggattatatgcatatttactatccccgggcatcttaccatccttcatagggaatgattccaccaagttctgagttggattcgtacgtccaaagcctaaagcatttccactgaaccctaatggtccgtttttcgtttcaatattcttgtttttgccagtctgtcggaagaaaatcaattctggattattagatttatcataaaaattcaagaatatgttacgataatcggacgtaagccctaaagttcctgaaccttccggtccaaattgagtaattatttctttagcggcctcagcagcaaggttccaacgattacgatcataagtagcatatcctacaagttcatttcctggttctattgttctttcattaaataatgggctggctgcatacaataatactcttgctttcatcgccatacatgcctccttagtaggaacgtgagcataatcaccagcatcattcataggtaaagatcgtagatcattcttaatgtcatccaattcatctataatataatcaatgcattgagcaaacgtatttcgaggaagttctatatcatcacccaaaacatagacattatcaccgattaaaggaataccgccataacgtttcaccaattcaaaataaaaatgagctctcaagaagcgtgcttcagctttcatactagaatttagtggtttgacttcacctaaagcatttgtatatttcaaattgaaaggaacaacatcaatattattgataacaatattcgctttgcggattcctgtataaaactcgccccactccatatctgcaacacgtgttactgcagaataacgccccatgaaaagtttatatacatccggatcactgctatctatagaaatcgcatcatccgaagcagcatccaaatagtcacctccaacacggttatttccatcatataagtggtctagataaatatcattaagaaagcgttttgcctgtataccagccgaatccactctcgaaaacacataatcaagtgtaaatttctccacaggctctgtctcgtatccatcgttacaagctgaagctatgaacaataaacccactcctaaaaaagttaaatatttatttcgtatcatattataattctttaaaatctaacattaatacctgtgctaatgcaacgttgtatcggataactagtaaaaccgacctcaggatcaactaaatcgcaagcagacttcgttaatagattctgcccattaacaaatatcttcacgcgtgttcctcctagatagttacgacaaaatgaatcaggtaagttatagcccaaggaaatattcttcaaacggataaaatttcctgatcgtagccaaaatgaagaattccaaccattaccctgattatatttgctccccccggcagtcaatctaggtaaagtcgctgtttccgctgtttctggcgtccaacgatctaacatattttcataagcttgcccatattgttgattactagattggaaaccttccaacaaagtccagtcattcaacatcaactcccgattatatgctccttgccagaacatcgaaaattccaatcctttccattcaaaccctaagtcaattccaaagtaagaataaggtttatctccaccaatcacagtacggtcgaattcattaatcactttatcaccattcatatccttgtatttaatatcaccaggctgaatattattaaatccatcgatcacaggactattttcaatttcttctctggatgtgaagaatccttctgcaactaaaccgtaaatagcacccacaggacgcccagtctgacgcaaatattcttctggaactttttgttcatccatatacaatagtttactttgctcactactccaattagcagaaacgtaataattaaaatctttgatacgatcttgataagtcaaactcaactctcctccgaatctacgcactttacctatgttttcagtaggataattttgacctattatttcaatgcttttgcctcttgattgcaacaaatcaaagtatttatcattataataatctgccgtcagttttaatctattgttaaacaatgccaagtcgattcccagattcaatttataagctttttcccatgtcagaaaagggttggccaatggagagttttcagttgtaatattaccagcccctaaatttgttcctaaaggataccctgtagccacattagatgagaaagtttgctgatatgtataataaccagtattgtctaatccattacctgttttaccgaatgtcccacgtatcttaaataggttcatccaatcaacattttccataaagctttctttgttcatatcccatccaagtccaaatgcataaaaagtaccccatcttctatccggagcatagcgattataataactttcactcatcgctatctgtgcaaaatacttgtttgcataatcgtatgaaacatcagcaataatattagaaggcaactgaggcaaatcataattaaccagtacatttcgagtatctcccattacactagccctaattccatgatctccgaatctgcgatcataatcaatagcaaactgaccatacatttgctgataacttgtaacagatccaaatgagttggattgcgtctgtgttgcaccatataacgcatatacatcgttcccctctttatctatggtatatgaatataccggagaacgcttacttctttgaatatacgaacgattctggatagaaacactaccaaccatacgagccgataaaccttttactaatttatcaaaatcatattttaggttaatactccccaacatatctcttgcaccatctgtaatatagccggaattaattgtctgcgacattaagttatgatcgaatgacacattgcctccccatgttccattaggatttctgatcggataagcattattaggagtattataaatcgaattcaacaaatttccatatccaacaccaggctgagtaccttcttccactcgtcccaacaatgtcaccttcgctgtaaaatcgtccgttatattgatgtttatcttggaagaaatcatataacgttccagtgacagatttgtatcatgtgaatctccattatctgacggattaataaacaatccattttctcccatgtagcccaaacttataaaatattgagcgtatttattaccacccgtaacatttaagttatacgactgtgtcgttgagctattattcaacaattcatcataccagttcacatcaggatgtgtaaaagggctagattgcattcgaaatttattaaaatcatcatacgaatagaatggttctttaccatcattctgtaaagcttcgtttaacaaataagcatactgatatccagatagtggcttaggtatttttaacgcactttgtacaccgaaacgtcctgtaaacgataactgaaatccttcttttattggttcctttgtagtaatcattaatgcaccacgagaactttgcatacccaaaaacatagatgataaggcatctttctgaatagacacagattcaatagcgtccggatcaatcgaatacaattctctttgtacaccatcaacaactactattggggcattgccacgtgaactaacactaaactcagtattatcactataaaatccttcaccaaatagcggtacattaccaatcaaatcacctcttgaattagcagtaatctgatgcgcacgtgcaccacgatattgagagacattcaaacctgataaacgccccgttaaagatggaagaatagtagtccccatcatagatgtcaattgatctgtataaacagtagaagcagctcctaaaaaacttatcttttctttagattcataaggaccattaatggtcgcctgatttttaataaatgcttctgctaatgtcactttgaaaatccgttcagagtgttttaatttattaacttttatctctttataaagaagacctggatgtgacaagcataaaacatctgcctttctgtattgaaatttaaaaattccatcagcatcagttacaactttataatcactattcttcatggttatcgtcacatccgaaaccggattaccatactggtctatcactttaccggtaatattagcattaacacctatttcttgtgctgatgtatttgaagcccccccccataacatacacatagtgagtaatgcaaaataaaaccgcctactttttttatttatcatattatacatacaatttatctatcttttagtattaataaaaagaataaatgccgacagctctattcacagacaagttcacaaataaaaggttccttctcaccttcaacctcaccaccttccgcagctattttatcatccgtacccgtaatgcttatttttccatctctattagtgaatatataatctattctagtgattatctctccatctgggatatcaaaaaactccgtcggccaaatagtcaaattaaatattttattgaaggtacgatcttcttttttcattaatgttttctctgttttctcatctactttataagtattaccattatcagtatgcgctgtcgcctccatatagacggcatcagcagaggctagatcatttggatacgtatctcccataaaagtgaatgttataaaatcatcttggagaccagccaatggttctgttttattaaaatgaaaagcgcaaaaatcagttactgctcctgttccttctactacctcaaaacattgttcactatatgcaactttataatggtcttcattagagcttaaaccatcatcagagtgatttataaagaacccaatacgagctttgagatttttcggtcctgttttacacttaaaactaatattaaatgtgggattatcatggttttttatactatagattttatccgtctgaaaagccacccattccatatcattcaacacatttactccaactccatattttgccattaacgcatccgaccaagtcattcctccaccattctttggcaaggaacttaccggaacaggtgacatagaatatggggttactccatcctccaaaccggttgcagtgtaggttaccgttgtattttcacgtatattccaacttttaggagccaataaagccgcaataaaccgtacatttccatggtcttctgcacacgcaatatgtccctccattgtaaaagttgcgatttctccggcctttgcccaatatatcggatctttttctgttccttgattgacactgacacgatcaagatagacacatccgatcacgataattgtcagtagtaatagtacactacctgccaaacaaacattattcttttgttttatattagttctcataaattcactttataacattattcagatatttgttcaaaagtataaacatacttattactgtagcaaccaggacttaacgttatggtaagtcggcgttgcccatccacagtcagaaacccgatttctgttttaacttccttttcagaaccttcttcctttaaaatcaaatgaaaagggtaaattggatcgtccacgttccaagtaccatcgttctttactataaaaggcagataattattaagtttatatgtattatccttattcaataaaacatgaaaacgtttaaaatccatatagtcagtaatatctgttccatttcttaaaacagatactaattgccaatttccatctatatccttaggaacttcggaatatttctccggagtaatctcatctttaaatgagttgcatgaacttataatgacagccaatacaaaaaagaccccggttataaatcgtatattcaatctcatagcatataatatttcaataattattcataataaggattttgtagcaagtcatcactcttgactgtctctttatatggaatcgggaaaaaatacatggcttgacgaaaagtatgctgtcgaacagcaacaactctccctgtctcgttgccatttgcatctcttgttatttcaaagccatgcatcatttgattatcagtcttatcagcaatcatccaacggcgtacatcaaagaagcggtgcccttcaaaggctagttcaatacggcgttcgagtcgaatggcctctttcatctcatcataagtcatattttgctttatcccgtacattccatcatccccaggctctatacctgctcgtttacgaagcagcttcaatacttcataaggacttacgacttgtccacctaaaacatcttcatgatcaggaccataatactcattagccgcctctgcatagttcaataaaatttcagcataacggatcaagtcaaacgcttgcgaagtacccacaaaccaatttcccgctaatccacgatggctcattttacgaatataatatcctgttggtgtaccagcataaattgcatcggtcgtagccccaggtcctcgataagtatatactatatgattattatcaccagcactcttcattttagtcccattccaaacaaccgtattggcgaaacggggatcacgcccttctgccggatttaacggatcataagcatatttctcactctttcctaccgattttccatctttcattgggaatagctctaccaaatcatgatatatatacccaccattaccattaccaccacaagtaggtggaccgaaaagagcctcgcgagtattgcctcctcccggtctagtttcaaaaagcatctcacaatatgttccattagcatatgttccatccgctccatcagtaattttgtagaaatcattattgtggaatatggcataaaatccccaacccggttcttctgcaccatcattatttacatgacgtgtataaatggaaaaacgattcattcttatcacatcaagagctgcttcaacagcagctttccaacgttctttattatactctgaatatccgattaattctttagggaaatttgcagaatttccaaagtcactaccattaaatagggcactggcttcatataaacgaatacgtgagaccaatcctttacaagctcctgcagtagcacgtccattttctggaccagagaacacgtcaggtaaatctttagcagccaattcacactcttcaacaatgtacttcacacaatccgcatatgtatcacgactggtcttcattttatcatcaacatcatacacattatctccaatcaatggaactccaccataatgacgtagcagcatggcataataccatgcacgtaaaaagcgagcttcagccttataacgtatttttatagcctctgtcaatggactaccgtccacatacttcataaacacattcactcttcgaatattagtatatgctttcttccatacaccgtcttccaagacattaagcggattgatagttccggtagcgaacataacatcattagtcacagaggagacaactttataagcagcctcgtcacatgcagtctgcaagcctccatgttgggttacaaccccaaaagccgtagttttatatcggttaggactaacgtcgtaaccaacatcaacataaatttgagataggaaacctgcagtatatgcactatctgcaaaaacagattcccgatcaagatctgtcgtctctacttgttctagattagcagtacaagaagaaaacgaccatagacctacaatagataagcacaaataaaataagcttttcatacacatagaaatagcgattaattaatttaatttataaactctcaaaagtgataactctcattacccaactgatctttataaaagaacgatttaactataaaataccactaaaaagaataaaaaatatttttttgtaaaaaagagactgcctcaccggaaacagcctctttttctaaatcaaatataatccataatgaatacaaactgcgcagtctgcgaacaaatcagctatcgggtaagtccataagtagttcctccccaattatctgttctgaaaggagatgcaggaaggcctacactattatacaaattacaaataggattattagcccagccatatcgtacagctatagggaattctacttccggacaagataccacaaccatattaccttctattacagcattcgcccaataaaattgatgatcaactcctgctacagcaaaacctttcagtactccattatcttttactttcaaacctttctcaatatttttgaatgaaactcgaattttatttccttcaattttataagattcatacattggtcctgaataagagactttttcaccataggtttgtgctctagctactaaagctagacgtctgcctacttcttgtttattcttggggtggatatcaaaagcttcacctatatcaatagttactgccattcccgtattgtccaaatgcaaagtatgtgtttgagcctctcttagttcagcccaatccgactcctccggttgtgtttgttgagccataaagttagccaactgtacaatatagaatgggaaatcatatccccattgtttacgccaatctgttatcatcaacggaagaagctctcgatattgataagcttgaccggcatttgattctccctgataccagatcactcctttaatagcgtatggaactaaaggatttagcatcgcattaaacaaataagtaggagtattaggatccgaagtactatttcttggcatagctggtacctctttcattgtcattgcaatcttataattccacagaccagctaattcaattctttcagtctcagatttctgtataaacacattttcggaaggtccataaattccaccggtacccccagtatctattacgcgaacagatatcactgcttttcctctttttactaactctttgggaattgtataacttcttggtgacaaccaaccttctgtatgtcctacctctactccattaaagtaggtaaagtcattatcatcaacctgccctacacgtaatgttaaatcttggttttcccaatctaccggaatatttatttcttttctaaaccaaacaatgccattgaacccttttaattcttgttcttgcattattccaggcactttcattgttttccattcattcgtatcgtagtcgacaccagcccaaatagcctttccatcaacaaatcctctatccttctcttcaatcgctctaccccagttctctaaagcctgattatatactttctcacgaccttcttttgttacaggcaactgcttgattgcttctacttcacttttcagtgcgggcatcgtctccaaagcttcggcactcatccatgtttctataattgttcctccccaagtagtatcgatcaaaccaatcggcacatctcggtatttatgcaaatcacgaccgaaaaagtagccaactgcagaaaagtctccgattgtttgtgaagaacaaatttgccatccatcattagtggcatcaaaatctgtaacgggaagcgtactgattgtttttttgatttgcataagacgaatattcgggtacttctgggcatcagctatctcttgctgataattatttatcttgccccaaccttctacttgcatttccatattagactgacctgaacatatccaaacctcaccaatcaatacattacttaacatcacaggcttaccatccgaaatggttattgtatatggaccaccagcagatggagtatccactttaacgatccattttcctttttcatcagcgagtgccgtatactttttcttattccatgatgtgataatttccaccgtcttattaggtaatgtttctccccaaattggagcctttactcgttgttgcaacaccatattatccgaaaagataggtaacaacttcacttgtgctgatagcattgcactaccaaaaagagacaataaaacacatacaataatcctattcatatctattaatgttttaaatagtatactatagtcaatttatcttatgacgaacaaaaatacgaaaaccactaaatatactactaaaataagcaaaagagaataatgatctatatagatacagattccctttacttttaatatcagaagccaaattcaaggaatcctgtttactcaaaacataccaaagtatcttggtacattctttttaatattcgtcaactttcaattcaattctatatgaatcaagccgtttctgcaaacgatcctgtatttttttatattttatatcaccataaagattattgagttcatttggatctttttgtaaatcatataattcatcacaattcaaatgcttcttttttgcatcgtaaaaatgaatcagtttataacggttgtcacgaactccatcatgcctacgtacttgatgttgtgcaggaaaatcataataatgataataaatatcactcctccattcattagggattctacctttcagtaagggaaccaatgaatttccaaccatataatcaggtttcgctattcctgcaacatccaaaattgttggtgcataatctatattttgtactaaggctttacatttgctattctttttcttttccggataatatataataagtggagtccggaaagactcttcatacataaaacgtttgtcaaaccagccatgctcacccatgtaaaaaccttgatctgaagtatatactattactgtgttcttcattaaatcatgtttttccaaatagtccagcaaacgtcctacttcatcatcaacagatttaatacatctgagatagtctttaagatattcttgatatttccatctctttaagtcctggcccacaggttgctttttctgaaaatcttcataccgttttacataagctgcttcccattgttgacgttcacttggattcatgcggttaagagacaattgcataccttttgcattccattctttgctataaggttcagtatcttttaattgattaacttttagatcataaacaattgtcatgcatttatctatttccatttgttgcgaatgagcaggttcacaacgtgtgctataatcatcatcaaatgtgtccggataaggaaactctacatcttcataaagatgtagatatttagattccggcatccaatttcgatgtggcgctttgtgatgaacaaataaacagaaaggtttagaattatttcgatgctccaaaaagtttatagcataatccgtagtcaatgtcgtagcatatccttctcggcgaatatacttcccacccgtttccttacttttaaattccgggttataatacgctccctgatcgaataatatttgataataatcaaatccttttggttcacatcgcatatgccattttccgacaacagcagtttgataaccattctgctgcaaaatctcagatacaaatgttttggttgtatcgaccataccaaaaagtgttcgttgtccattctggtgactatatagtcctgtcattaaacaagcacgagagggagtagaaagagaattttcgacaaatgctctttgaaaaagcatgcccttcttagccaaacgatctaagttcggagtaggtgctaatttagttaattctcctccataggcactaatcgtttgataagaatggtcatccgtcattatataaacaatatttagtttatccgatgatctatcattctgagcatgactccatacactatttatcattaaaaacggaacaaataaagctgttgatttcatggtggttatatttaattattaatcaatttctttaatctctctcacccagcagaagaaaacaatactaatgtctgactctgccttattatctacataataacttttatactaagacgatttaacatcaaaataccactaaaaagctaaaacattttatgtatataacttttcaactctgctatttataattcgaactaaatcccaattaagacatgtaagtccgacttttatcagcatcgaattcaaatttcctttcagaccgtataaacaaaatgtttatcatggctgtatccaataccaagcaaacgacaaagagagtacatccatgtgttgggagtactctcttaatcgactttctcaatagagttaaacctaaaaaccgctattcttcatcatatacattctgccaattgaaaacacggaagaagaatggacgatagaaatccgcactacccggatagttaaagttatccaaaaaatcatgagaatccgtgttagttgagaaaacaagttcacccattctcgacagatgaggatgcaaatttaccatatacaaattcttataatactgatcaccaatcttatcaatcgtttcaggaatagcaaataatactttttgatctgtgaaaggaccataaggagtatcactacggaagataagcatagagtgtccaaaccattttgactgtccaatcatataatacttacctgtttcctcatctttaataacccaaggcatagaacactcactgttgttagctaatatattagagcgtttcttttctgcatcattcggcatgttgtctacccattgatattcaccatcatcaccacaaacataatatttccaggggctagttaaatcacgagattctgtacgagctaccaaaacatcataaccactagttgtatacaaataaatatgttcaccatcttcaaacaaggtattgccatatcccaaattatcacccggcttaaaatcatgatcaggttcacctatcaatttcatataattttcatcacctggtttaccttccaaactgtatgtagccagacaactgccaaagcgtctcatcaagttattggaatcggtattatctactgctccccatatcacttgaagtactttttgaccattcttttctaccactgtaccatcaccggcccaataaagataatcttgatcaatatcacctttctttatttcttcatcagacaattttgctttcggatggcgaatatgggtacgcgcctgataatatcgttctccttgcgggttatccgtttgaacgtaatctgccaaccaaatcaaatcatcatcagtttctccgggcgttccatctaaattagctttttgtaccatcaaactgtttcgaggaaaactgcatcccccccttgcccgattctcaggattaacgaccccataaaagctatcattaaacgaccagaaaacatgaccatccggcaataaagtcgttaaaacaccatcacctccattccaacccaacgttcgggtgaataacttatcatattttttatccttatacacaaatacgtgagagtcatgttgcccggtattaggtagtaattccaaatcccaatcactttttagctcggggggatttatcgctgttccttccgtaccttcagtcgtttcatattctactatttccggatcgtaatcattacatgctgatacagaaattccgatcgctgcgaataatgcgctatataatatatattttctcatggttcctttctttattaatctttatttgtaatatccatcggagtcattgtttctttcacttcatgccaaacgtccatattattactttgaccatctatagatggaatccgataattataacgtagcgtaaattcccctttttccggattgtaataagatggtttatcatccatattctttactctaacagcttggttcgtattaaaccatggagtcacaactactttctggcatttaatatattcacctgtaatttctccttcagcactgattaccggaacatcaatccattcatcctgacttacagttgctatcacgcttcgcaaacgcagactttgttgagatgcacctggatctgactgaaccgttccaggcaacaccctaataccatattgagagataggagtcactaattttgtactattcataggagattcattttctatattttctaaggtaccattgttatctacctttttctgcatagttcctatcatattataataaatacgcgatttcgttgttgcatattcattcttcatgaaaatcttaagtaatacatctttcttttcagaagcaaccatatagtctgaaacagaagctattgacaatggaagaatatattcttcttcaggtattagcccatttacatctacatgaataggaaataacacgtacggttctttattaccggctttcaatgttatagacattgaatttacgctatatctatcttcaggcaacattaaggcataattgtcataatcgttatcatgcattaagcggttgtatttacttaataaatccatgttatactctaatgttaccgttacatctttatcaataggggtagtacccccaacatagatagagagaagcccctgtgcattttcatcgaaagtaaactcctgtgagaaaatattattctcaccacttacaataaatatctctttacggtattgttcgtctttataaaattcttgctcgcaagagataaaggtgcccgcaaaagctacacaaatagccgtagcagctagtttattcattatttttgtatctttcataattgcattttattaaattatttctcccaaccaggattctgatctaaattcttcgaacgccttatttcatctaaatgtattggtaacaataacattttaaacttaaatactcgttcataaatagatctgtgctgaataacaatcggctgataaaaaccatcccattcaccttgctccacattcaaaccagtcaatggttctttttccaactcttctataataccccaacgtctaatatcgtaataacgacgtccttcatggaataactctatgagacgctcgcgttgaagtactgtattaaagttttctgcagtaatcaaatcagaatcatccaagccgggaagtccagcacgaaaacgtatcgggttaaatgctgtttttattgcttccggatcacgagaaaatgtttcttcacctacagtatgcgattgagtcaaattatttaatgcttctgcataagatagcaatacctctgcataacgaatcaacgggaattttttatctataactttcgcatctgtacccgatttcgcatcacgaggatgaacatatttcttacaagtatatccagtgagaaaataagatgtcctaccataccaattgttttttcctgaattagcaccattaaaataatcaactacaatattctttttactaccttctgttgtcgattccatagtccaaagtgcatgggaataacctatatttacataaaaacgaggttcacggttcgcatatgctttatatgttttgtctttcaatacataattcttggatagcactaaatctcctgatgtcacacaagtattatcataaggacgagcttcataaggatattcggaacttgattcatgaatatctttaccatctgccatgtagtaagcgtctacaattctctgtggcacgctaattgaaccagttccaccaaacgttaagggaaaaacgtgatctaaatgttcattgatattctgagaagttccccatatcaattcagaattagtattcgccaaagtttcgccattaaacatttcggaatacgaacggaatggatctatacctccagcaccaaccgggaaatcatcatgaggcacatttgtcggtaatttttctgtgtatgacggatctttcaccacatgcagttcataagcattcaagtccataacctttttagcagccgctgcggctagtgcccatttacgttcatcatacttttgagatatataatgtacaccatccgtactacgaacaaaattgctaaaatatttatgtgcagcttcgccaccattaaataacgggcttgcagcttgcaatcttaaacgggctaccaaagccagcgcagcaccttttgtaggagcatcaattttatcaatgggttggctgacaggcaagccattagctgctttttcgaactcagaacagatataatcaatacattcgtcataagtactacgagtcaatgaataataatcagtatcttcattagtatttagcacatcatctcccagaataatgaccggtccatattgcattaccatcaaataataagcatacgctcttaagaaacgtaactttccatccaactccattttgtcgaaaatagttgcatccggaacctcattaatacgaggtaatgcaatagtcatcttacgaataatcttataacaattgggccaaatattgaaattccaatcccatccacccatcgaagtagcagaaatacgatctgtagtaagttgtgtaccagagaaagaaacttctacaaaaccattagaaaaagaaccgcaagtgactgcttcatccgaaccggtcacaccgggagtagagccccaatgccataatcttccttcttttggcaataacgccacagcaccattataatagtactctaaattattcttattagaaaaaatggagtcttccttaaaagtgtcttcaaaataatcgtctacattcaaataatcacaagcactaaacagccccacgagacagcagacaaaggatattaaaatatattttttcatgaattgctttctgttaaattgatacttattttaaaaattcaaatataactgtagagaatagcgagctggtattggatatgcctgtccacatgcattcgcttgctccggatcgaataattttacagaatcccacactgccaaattctcacacatcaactgtatatccaaagactgaattcctaatacacgtcgcaaagcgggcatttttaagttataattcaaacttaactcctgcagtcttaaatagcgggcatttcccatccaaaaagtagaagctctgttattattctcattctttccataatacaatcgagggaaacgggcattaggattctctgtagcaggattgcctgaatattcagcagagatccatcgattagccggattggcagctattgccaatacattaccttgtgctcctctattaaaaggtatgtagccatcaaaacggtcgctattttgtccaccatataaaaacatatttttccctgtacctttaaacaatacatttaaagtaaagtctttataacgcaactccgcaccaaatccatacattagttgaggtattccagaattagcaaacaaaggtactctatcatcatcagttatctttccgtcagcattcacatctttatatttaatatcaccaggacgcactgtaccaaactgttgaggactcatatcaacatcttgttgatccttaaataaacctaatgctatcaatccgcgttgaactccgtttgcatatccattagctttcatatatggatacgggtgattattttcttcccaattcaatactttatttttagatagggtaaagtttccacgtaaagtcaaatacatatcttttgccagtttatggtaaaattcgaaattaccatcagctccccaactcttcatactccccacattaccataaggtttttgaataagacccacgtaatcgggaatcacttgacgttcctgaaaaattccatcacgtttatctttaaaatagtcaagagttactgtaaacttatcgtcaaataaatggagatctacaccaaaatccatcttttttgccttttcccacatcaaattatttgctcctacttgttcttcctcaatacctccggttcctccccaaggattgatggtacccgtatttcttttaataagcgttaaataaggaaatcgtctattggatattcggtcgttaccaaccacaccataagaagcacggaacttaaggaagttcaaccactttacgttatcttgcataaatttatatgaagtaggcacccatgcaaaagctcctgaaggaaagaaaccgaactgttcgcccggcttgaaattttcggaaccattcaatccaaagttgaaatcaaagaaataagcatcctgaaagccataagtgaaacgtcccgaaagactttggtaacgttttgggatagcattcatactgctattcgctccagactctgaagtatcttccatataatagaataataatccacccaaacgatgatcaccaaatacacgatcgtagttaacacttgcatccatataaatctttctccagttccacgacattgatgtgtaactgattggagtcgcttgtactttacgagtcataatcaaatctcctctataattgcgttcggaagcttgccataattcaggcatcttattccggctttctccatgcaatccttgcgtatcccacgaagcttgcaatttcgccgtcagtcctttcgtaatcattgacaggtcttgattgattcccaaagaaaccatattgcgattcttttgctcttttgtacttccagtataatttagtaatacataaggagaaatctcatctttttcggctactgcaggtaaacgaccatttgaatagcgtagtggataacttacaggtgtagtttttgcctgcgaactccatagccaatcagtgaaactctgtcctctattgtatggttgtcccatactcggacgatcattaaccgacatatatccggtagctccaacatgaacttgagtagtctttgtaagattaacatctaaattcaatcggtaattatatgtatcataacctacacctttattatatttactatcatcggaagcattataagcagaactttcattcgacatacccaaactggcaaaatatcgagctactgtactgcctccttgtgcactgacataataagtctgttggaaagatgtaggattcaaaataacatcctgccagtctatattcggatacaaatcaggatccagcccgtctctaatgatttccaactccgttgaattatatagtggcgattcaccggaagccgcttttgcctcatttgccagcaaaccatattgataaccatcaacataatccggcaaacgttttaactgtgaaacagtaaaattagcacgcgctgttatttttaatttttgttctaagccgcgtttagttgttaccaatactacaccattagcaccacgactaccataaacagctgttgccgatgcatctttcaatacagaaaagctctcaacgtcggctgcatcaatctgactcaaatcgccctccaatccatcaatcaaaaccaatgcaccactactggcgccaaaggttcctataccacgcacccaaaattccgaaatatttttccccggctctccactatgttgcactgcaataataccgggaacacgcccccctaaggtatttacgatattagtagacggcacatccaactctgccggtttaattgaagagattgcaccggccacactaactttacgctgtgtacccatacctactaccactacttcatctatttctttggatgcaggctttaaagtcaccttcaaattagcctgtttattgactaaacgtttttcaaaattttcatatcccaaaaaagaaacgactaaaacatcgtattgattgaccttcaatttaaagtttccgtcaatatctgttgtgacacccacacccggtttgtctttaacatacacattagctcccggaatcggttcattcatctcatcgtaaactgtaccgaacaatataaagttctgctcctcttgtgcgcaaagcatcgtagctaatgaaagaaacaaaacgaataatattaatactctattcataataataaatgtaaagtttggaatttgttattcaatagctaaacggcgaatggcagcattctctgagtcaccgatgtacattatgtcttcagaatcgattaccagtcctactggtttattcaataaagctacatctgaagttccattctgataacctgatttttgagggattcctgcaacggtagatacatatccagtctccatcgttatctttcgaatacaatggttgtttttatcggcaacaaataaattaccttctgaatccatacaaatctgttgcggcgaattaaatctagcatttgccaaaggtccatccatatatccaccagtattttccttccctgccaacaatgtacattcacctgtactaaacacatatttataaatgcaatgagcagattctacagagaaatataaaatgtctttgtcaaatacatcaaatataacaccataagaacatccttttggagcaacgacattgggatacggattcagcacctcacctaagctagtcgcaggatcaaagcgtaaaatttctccagcccaacttcttgtataaaacattccatcttctggattcattgcaaagcattgtttatcactccatactgcccatccatcagcttttgtgggctccacattattttgccaaacaatcttcccttcttgtaccttagccaatcccattttcttgtcataataccaatattcatgacttgtagaattagctcgcaatttataacaagtaccccttaatggactatatactactacaggaccatttaatccatagccactagactcaaggtatttaatctgattagcatcttcattcattatgtagcaatcgaaattagaattttgatcttctacatcaaaataaatattcttttcttcatctatggctagagccttgtttatgtttttttaaattgagcttccgaaagagatactgttccccgtggattcgcatccgatttaactccaccaaccaacgtagtaacattagtttgtatgacataatcaaatatatctttataagtttgttcttgctctcccactttcactttaatcacgcattcttcccctggaagacgcggtgctaacaccagtattttattaccagtagctgatattacactagcctctttctcattaaagaacactttaacaatttctttgttattcccaaaattctgtccatacaatataacttgcgaagcaagtggtcccttagttggattaaaactacttaagacaacttcttcgttagggttatattccatcgaagagtcatcatcgcctttacaagacgtaaagcaacagcctacagctaaatacacaagccattgccatttaaaacatttgtgtaacaaatttttcataaaatatcacttttaagaattaatataatatctacgactagtatcgtatttcatttattttgtatttctttgctattgttctatttgtgttatttattatatgacgaatgaattaagattgaccactaaagcctatcttacttttttcgtaccaatttaaattgtaagtaaatgagtataattagtttatatactggtagtatctgtcatactgagcgtagccgaagcatctcatctctgtaacgataaggagaagagatccttcggcaaactcagcatgacgcacccgtaagtacaataagtacgcactaaatgggaaagtccttccgaagagaaatgttaattacgcgagatttgttctatatccttccagatacgtaatgattacttctttttctctacaagcaacgtatcttcatactgttttctcaatttcaacaactccttcaccttctccggatacttatctttcaaattagccgattcggtgggatcctctttcaagttagtcagataaagtccatcaatcactttgttcttatcgttgggaagaacatcaattgcattattaatcaacttccagtcgccataacgaaccgcccactgcttttcaaaatcaaaatggagcacatcgtgcggagattccaacactcccccttttatcagcggaacaaggctctttccatctatttccaatccgtcggtattcaatccgcagagttcgacaatggtcgggaaccagtcgatattcatagcgacctgatcacgcgtttcaccttccgggaaatgtccgggccatgacacaatagcaggcacacgaataccaccttcaaacagtgagaacttacctccacgataatcaccgcaatatcctccaccaccaaatgtgcgaacttcggtactatgcccgttatccgactggaagataatgaccgtattttcatccaatccctgagaagttaaaaacctacacaattctcccagataatcatcaaatgtagatacaaaggcagcatacattctgcgaggattaggtagtttggaataatattcgagccacttctcactcggctgcaacggataatgaggaatattcaccgcccaataaagaaagaaaggtttatctttctcccgattcttaatatagcctcttacttctttcatcgtttcggcagcgaagaatttgccgggatcatagatttcttcatcatttctccacaaatcgtgcatattcggaccaccccaataaaagaaatgtgagtaactatcaatacatccacccaagaacccccagaaataatcgaatccttgtgccgtaggtctatattctttccatgaacccaaatgccactttccgatacatgcggtctgataaccgtttgctttcattcgttcggcaattgtctctttttcaggtcgaagtcctgtccatccggcatttcccgtcagccctgtccgtttggcatattgtccggtgagcagacaagcacgcgaagcggaacttaccggcgctgcatagaattgtgtaaaccgcactccataagtggcaagtgcatcaatattgggtgtacacagatcgggtgcaccaaaacagttggcatctaatgtgccgtgatcatcggtataaataatgatcacattaggtttcgtttgtccagcttctgctattcccgacagcagacaaccacttagtaaagcaaataatttcttatccatttcttataatagtttatatcatgaaacccacatcattctaatattgaataaacatcgtctgctcgtccatttacatgtggatagattgccacttctcatccggaatattcgtcacatccgattgtatcttcatctgttcaaacgccaagcggcatttattgtagcaagaactcaaaagcaaattctcccgcttctactgcgaccgatcccttttctatgtttatcttctttccatccttctgacatatgacagcatttttcggtgtacaaaccgtagccgtcactccggcaggaacagatacttgcagatttaaccggctatccttcaactcccaacggacagctatttccccgtatggagattctttcgttattctcgcccaagttactcctgtcggtatttgaggatcgataaatacatgacgatatcctggagccgcctcatctaatttcaaaccacctatagcctgataaaaccaagttccgatgccattatagcaattatgcaccctactgcgttcgccactccaatattcccatgtggcagtggcgccgttatctatcatatagagataaccgggataatcacgtttcttcaacatttgataaaacagattgacttccttgttgcgtgtcacccattctgtgaggataggcacaccgacaagaccgacggcaatatgccctttgtgtttctgttccgtcgtggcaatcattttctctttcactttatcgtacagaacattcggaacgacacctaccagcataggataagacatatccaactgcgaacctgtagcataaattccctcatcagcacgatagaaagactcatgaatcaactcattcaactgttttttgcgaagagcaaacgcttgtgcttcttcctctttacccaatttgagagcagtcttttccatcgtcgacagacaatcactgataaaacagttacataccagatcgactgaagcctgattacctgcatccactcccatcggagctagccagtcgccaagataccagtcgcgatactttgtatcaggccagcgtttcagcaatccgtccaccgtatatttatcaacatatttaaaccattccttcatttgagaataatatttctcaatcaatcgcggatcattataatggatataagttctccaaggcgcctgcacaaagaagccgcaccaatacgggccaccgccaccggcacccggattaggacctacatgtggcaaacttccaccttcgcgcatcgaatcgctccatgtttgcaaccagttttcgaaagtcggggctacgtcatacatcatctgcaaagacattgtagatgaattaccatctcctccatatccggcgcgctccagatgtggacagtctaccatatacccgctgaaagtcagacatttcatcgtatactgaatcatattgtgtatcgcattcagatcagcatccgaacattcaaaagtagccgcctgtttgtagtctccataaatctgcagcgacttcatccattccgctttcggtcctaccggaaaattggaaatacgcacataacggtaggcatgatgattgaatttatttttgaaacattcgccactaccgccaccggagatgtaaatatcgctctcgccctgtttgtcgaattctccttccttcgtcagattatcgctatattccatcgtgatttcatgaccttcaggcaacgtaggcatacgcatctcaaaccatccggtctgtactcttcccatatctaccaaccaagtatcgtcaccgagttttttaatcgaaacgggttgcaacgtatcatgtatcttattcacctcacacatttgcggagaagcgatatgaccgggaacgttcaccgtcactaccggcgcccatttcagttgatccagcgtttgtgacgaaaggtccttcggaaggattcttccatccactctctcaccaccaaactgcaatgcacgccatgtgcctgtatccgaataaccactttcacgtcctttccaagtgcggtcagtcttagccactacttgccattcaccgtttctccatacatccagttcagcttttacaagcggaccgtcatatgcagtaccaaaagttgtcgtcttataccatccctgtcccaaccatatcaacagatcgttttcaccatctttcagataaggagtaatgtcgtatgtgacaatcagagaacgtttactcaaatgcgatacagccggtgtaagtatatcttctcctactttctctccgtttacatatatctcatgatagcctaacgtatttacatgcagaatagcagtctctcctttagtcattcttactttcttacggagaatgggagcacaaatcttaccaccttcggcagacgatccgatatattcgccttgcatctgattcttctctaaaatgcctacgccaaagcgggcaacaggactccatgccgatactttcttttttgaattccaagcacgcacccgccagtaacacattgaacgggaatttaattgcttcccttgataaggaaccatcaccgaagcatctgattttacttttccggtatcccacaagtctgccttatcatctgccaacgacagactatccgaagacacctgaatctcatagtaagtttgcccttgcttccacccgtcacctttcagtttccaactgaaatgaggggaagtattatcaatacccaaaggattgattaagttctcgcacttcaaatctgccacactaaaaagaacgctttcgttctttccatgcattactgatgacagattacaaaagcaaaacaacaacccaattcctattaacaatctcctgttcttcatatctgcattttatcttattttcgccaacttcacctgatgcgttgtcggcttattcatcttataaatcgtattgacaattgcatccatatacttaccccacacttcgcgcacctcaggatacatcgctttggtataccaatcatagctcgctctcaaaaacggatctttgggcaggtattctctcaatttattcacagcttcctgattatcggcaaacagcatgccttcttttttcaagaagctatattcggtccacaggtactctctgaaacgtttctccacttcaaagcgttcttcattgagatacatgatcttcatagcttgctgatattgaggagtattcggataatcagccagattaatgccgtttgccaatcgttccgacgaaacttcgtctatcaacaatccgtcgatagtcaaccgatagagcccgtcttccaaattcgcaatctgcaaacgttcttgattaaactcttccataaacggaactaatcgcatggcatcacgttgtgaccttttatttccccaaccatgccttggaatagaatccaaaggataaggaagtgctttcgccaaataatcaaaactcagactcccttcttctttcttcaattttgagatcttacagttcttatgattgattgctttcgagtcgtttgcatcgatagtcacatctgctacttcgtttccggcaagcccttgtgctttcaagaaaagatatgccatgaccatctgcccgtcattatccggatggattctgtctactctgcaaaatgtaaaggtagaatctttcttttgttcttccaagctgatcttcaccatcggctggttgaaatcgacaaagccccatccattcttcgcagccgttgaacgttgggcatcaatgatctttagaatagcatcgtttttattcttaaaaagaaaactgcttatttgggtcgtttcatcgtacggcgatccgcctatcagtacttttgttactttatctttagccagcaactgctcctctatctccttgaaattgtccagcgacttcttcacctgttgttccgaaagctcttttgcattgtctttccagtagatatcatatccggtatcgttcataccaaacgtaagggttatatatgtcggtttccgtttgaagacatcctcgtccaatcggtcttttatatcccatgcactctctcctccgattccggcattcattaccgtaatcggtttatccggaaaacgcgtcatataatatagccatacaaacgaatgataatgtccgccatgggtgatactattcccgacaaatatcactctctctccttttttgaatggaggaatggaagattgggcaagcaagttcccggctcctatatttcccaggaataataaaaggatgattcttatgcttattatacgattcattagtatgtacactttattgcaatttagttatttacatctcaaaaacggcccttacttgcagcttcacaaataaaggactttaatcaaaagacgattaaagttgagattaccactaaaaagaaggttctattttttgcgtttccgattggttgttcctaaagggtttacgtttcatcattcctataatgctgaatgcaagttataatcaaaccataagctcaccctttactagaaaaataaacaaacattttagtctcacggtctcactattcccacttaaacatcttattatctgatagaaaaagaatgagagatactttccaaataggtatctctcattcttttacgtaagcgtctcggcgatgtcgtcttttctttaattctacttcttcatatctttgctttcatattaatcaattcctacttatatgactgcacacgctttatacactcaaaccctgtctgagtataaatcccgtctgatatcttctccctgtttaactcttcgtagttattgtcatgagtgtcatgttaattatcatggtatggaactctggctttctcggcacggcattcgcattcgtgaacttcgttcttccctttcggcttcttcctccgaaaagccggtaccctgcttcagtcctttggttccctcatccgcgccttcggcccgtccgtcctcttcttcggatatgctttatggtatcaatattacttttccggatggggtgattatttccatcaagcagggaagttcttttggtattcaccgttttattgacctttacaaccgtaaaatacaggaggaacaatcatgtttgctttaaccgaaaatatgcgttattacctgtgtcagcattatgtcgatatgcgtaaaggtatgacgggactttatcagctgatcaagtccgacatgtcactttctcccgtttcaggagatgtttttgttttcttttcccacaaacgggacatggttaagattttacgttgggatacggatggttttattctttaccagaagcgtctggaagaaggtaccttcgaagtcccgcgttttaatccttctacgggtgcttacgagctttccaggaagagtttctttttaattatgcagggcgtctccctccggtcaaccaagtgcaggaaacgattccggctgaagccgtattgatgccaaccatctgacaaacagtattttataatgtaattgtataataaaaagctttgttgtccggttcttttttcgtatctttgaggtatgaaaaaagaccgggtcatagaacttctggaggaacagaacagacatttcaaggaacagattaaagctgctgacaagcgtgagcaacaaagtcagcgtctgatctgtgaactgacttcacaggttcagcaattgaccgatgccgttcaatccctggaagaagcgctgacgctgaagaacggcaaactgaaaaagcaggagaacattagccgcagtttgagtaagcttgtcagcaacgagtctgaaaagcaaatatctgataagtcgcaacccgtttctgagacagctccgtcccgtccgtctgcttccccaaaagaacgggggaataacaactccaaacgtaaagagcattttgaactggaagaaaagataatcgaagtcaatcccgatcatccccttttcagtatgtctcttgccaaatttatgggataccgtgattctatccgatatgtctatattccgccaaagttcattaagtacatttatcgacagaatatttatagctttaatgaaacggtcttcagcggttgcgcccccgccgccccttttctgaattcccaatatgacggttcgttcgttgccggtttatgccagttgcgatatatctactctatgagtgtagaacgtatcgttagcttctttcgggaaaacgggttcgaactcgagaagcccactgcccatcatctgctgagtaaaacggctgttttgttcgaaaacctctatgaagcactcagagaagtggtgcttgaagatccctacctctgttgtgacgaaacatatcacaaaatactggttccggagaagaacagtaaaggcaaaggggtacgaaaagggtatatctgggcagcagcggcggcgaccttaaagctggtgctctatttctatgaggacggatcacgtagacaggaggtgctttttgatttcctcaaaacctataaaggaacagtacaaagtgatgcatacgccccatacaggaaactggaaaccgaccaatatcacaatatcacgaggatcgcatgccttcagcacgtcaaacgaaagtttcttgaacaggataaggatccggacgcccgaaagatagttgaaatgataaaccaactataccaaaaggaacatgaacatcggacaagctatcagggatggacaatcaaagacaatctcgcacatagaaaacagtatgccccgccaatactcaggaagataaaaaagaaattattgagcctgcagacaaagccggacttattgccaaaaagccaaatggcggaggccattaattacacactatcccagtggaaggccatagaggatatctttaccaaaggggagtattatctggacaacaaccttgtcgagaggtataatcggtatatatcactatccagaagaaactcacttttcttcggaagccataagggggctgaaagaggggtaatactatattcattggcatgttcgtgcaggatgcatggcataaatacattcgagtatatagccgatgtgattaacaaagcggcgaagttaccaccaaatacagacaggaaaatatatagagatttattgccacacaaatggaaggaaaacagaaatagaatctgaaaagaaaaggataaggagatttttttcacaaaaagacgacatcgccgagacgcttactcttttaccatgtaaacaggctatttttagggtatctctcattcatatttgtggtatctctcactaagtctcattcaacaatcggcctcttttcattgcaagctgcatggatcaacatctacagttactttgtatgcaaacactagtataactgcctgttaacaagctaccatccatagacaaatgtcttaccctggatttggttgactactataagtatcaactaaaatgaataaaagatgaaaaagagtgacatgacctttagtccttatcagcttgaacttcttggcgatttctatcgttcgaatttctcagtttctcgttttgcccaagaaaaagggattgcccgtattacattttggcgttgggttcgtatctttgaggattctaatcctgaaatatccgcttatatgaaaaagcacaagtctcccaagtcctcggaggaatcctcctcaattactgccttacgtcttgagaatgagcgtttacgtgcagagcttaaagatgctaaaatgcgtgcgcacgccttcgatacgatgattgatgttgccgaggagatgtttaatcttcctatccgaaaaaaagctggtaccaaacaataaaaaggctttgtaaagggaggcatgcctatacggtggtctctctttgcaaattgtttggtgtaacaaagcaagccttttataagtatgttgaccatagtacggatagttcggcccgtgaacgttttgttcttgagtttgtcaaacgtgtgcgttcaaaggaccctggtattggggggatgaaactttggctgatgtaccgtaatgagttcggcaccagccaggcctttgttgggcgtgactgtttctgtgctatattgtccaagtataagctgacaatacgcaaacgttttcgggctccacgtacgacagactcctctcatcacttgccacagtatcctgatttaaccaggacattgctattagaacatcctgatcagctgtgggttagtgatatcacttacattaccatatggttgcctgacggcagttatgtgttctgctacctgtctctggtgacagacgcctatacgaaggagatcattgggtattgcgtaggtgatactctgggaagctgttacacagtggaagctctggaaatggcagtcagacgcatagctgcaaaggagattaagggtttgatccatcactccgaccgaggcgtacaatatgccagtgcggattatattgccatattacgacataacgggattcttcccagcatgacagaggatggcaatcccaaggacaatgccatagctgagcgtgtgaatggcattataaagaatgaattgctgcaaggaatgcgctttagttcaatacaggaagtcagaaaagctgtagcaacagccgttcacttctataacaacgaaaggcctcatatgagcttggatatgcttaccccggtacaggcaggagaaatgcaaggacctatcaggaaaagatggataagctacagagaaaagtatctgaatgtagcacttgcttaaaaataaatatgtacatttgcttatgaaaagaccaagaatgccctgctagcgggatagaaagaggaaaaagggtgagttcctttcttttttcttctttcaaagagaagagtcaaccggttaaaggaataagaaaaaaataagtaaaccggaggcaggaataataaataataaagtaaacagctgccagggttagtaatatttctagtcaacacatagcagctattagagataaacaagtcaaccattattagggaagtacaaaacgcaccgacatcctcatcgttccaccttggtaatacgatctgttcacaatggtgataaggtctatttaccatcgtgcactgacctgttcacccgggtggaacgatgcagatgtcggtaagatgacatacaaatgatagtaagatgtcataagaaccaaccttacatatcttccaatgacaggcacattgttccaacctcaaacttaggcaataccatattttttaaatgctctacgatttaactatttcagaatattacgtccagcttgttttgttcctgttttccatattgtttcatcctcacctcaacgccacctttcagcaattccggttctgcttctacagaaacgattgtttcttcgcccggcatcaaagtaatataattatctgacataatgacaggaagaacacgttcgtgagtggctttgttaactagtcgcaaacggttggcaacgctaacagtgttggaattgtttttcaacagcaatttcatcttgccttcattcagcattgacttatctaccaatttgcacgatacttccgtctccgacaatgtattcaacaacgtataatcaagatcggtcactccgtttctccaataaaagttttccgaaatcaagttacctttcgcatctttcagttctagacggatgaaatggagcggagtcagtttttctacattcttcgtttttttaccatagacttcaaattcatagagtgaatatccgaatttcgtagcacggctgattcccgacatcttgacgtagcgtgcactcaccgaagaaaaattgatctcatcagttgcaccctgtccgttcttattaatataaatagtcttccattttttagcatcgttagacacttgcagctcgtactctttggcacgcgctacttcccatttcaagactaccttttcaatcttttctttcttaccgaggtctacataaatccattgaggatcgctcgcattactttcccaacgactgccggcaccaccatcaacaacagataatgcaggacgagaagatgtagcagaagaagccaccgcatccttaccgaaagcaagattgaacggattgaagttaagcgtgaaagcctcggcgatattgcttgccgggacatctatctgttttgtttgtccgtaggccgccatctcttttccatttagattatagattgttgcttgggcagttgctccttccaggtcttcggcagtagtattcacagcctttatgctgttgttggatgagttccattgaatatgcaaatgctcgcaagctttcttcgctccccagtaagctccggtgggatcatagtaataatcatacgtctgccatacgaacgacggataggcaggatggctcatccaaatcaaaattccggcggcatcgttccacattttatcgttccatgcttcgtacatgcctttcattacttcaatattcagcaattgtgctttctcgcagaattcttccagatcggacgattctccgaactgtgtattcactgattttttataattgataggattggcattggaagcctcttttccgaagaagtgcttattccagacattatcatcgtcgttcttcagttgatcatcggtaggaagcggccaccacgattctttcgggatgaacttcttcacactctcaaaagtagggaaagtggcggtaccaatctccgaacgcatgccataaccatgatctatcccgtatggataggcaggtttactgaatgccaagttactgcccgaagtctcaaagtgatgtttaggaggctgatttccccaccaaccgctaccggagagtccatctttattggaacatgatttatacatccggtcgttattgtcttctttggcgatcatttcgcgcaagtaattgtccaattctggtttgggatgcgtttcgtttgcaccacaccagagggcgatagacggatggtttctcaaacgtctcaccttatcgagcgcatttgttttgaacgcttctggctcagccacatcattataggctacatataaccagaaatcatcccataccatgataccattctgatcgcaataatcataaaactcctcatccgtcacacagcctgtccacagacgtatcatattgtagttcatatctttgtggagcttgatcttcgtctcatattctttgccatggcatcgaagcaagtattcacccattccccagtttccgcctttcacgaaaatcttttgtccattcacaaaaaaggtcatgacgggatagtttaccacattattgatcatcttatattcgtacttcttaatgccgaatgtcacttctttctcatcagatacttttccgtcaatggagcaagtcagtttgcaagtataaagattagggtctccatatccgttgggccaccaaagcttagggttattgattaccatttgggcaaaatcattcttattgacggatagttgcgctgtagaattaccttctacctgaatgttttttgagaagtttatatttccgggctggatcacaccggtgaggacaacctttttcggagaagaagaggcgttcttgatatttgtagaaacagatagttccgctttctgcaatgtcggcaaatctgaacgtacccacggatcttccatgatagcatcgccagtaatggaaagataagcattacctgtaataccggctaatcgtccgggaatataaggcatccagtcccaaccggcacctgccagataactgggactacaagctactccgtatggatcttttgctttgcgcattttcttctggtccgggtctgtgataagaacggcaatagcgttctttcccgacttattcagcaaaggagttacatcgaatttagagcgaagcatgtgtccacttacatctctggaagaggttttagttccggatatctttactccgttaaagtaaaaatcggcatagcgattagtattatcgaagtggagccatactcgtttaccatctttataagaggcagggagtttgaactcggtccgataccagaatggacgattgaagaaggtttcgtctacttgataaatgttgtcggcataattgggatcgggcacgattcctgcctcaacgtaagatgtgaagacagttccggggacgactcctttcacataatcgggcattacgaagccagaggtggagatttgctctccggtgatattgttcaaatcggcttggggctttacctgccaagtaatttgtggattcgagctattcaatgacaaggtcggtgtctgggcttgtatccactggttgaaagcgaatacgctggacaatagtaaaagaattctgaatttattcattatctagtaatctatttaagtttcacaaattaagatattatagcatcatcacaagagacggaactggtagtaatctacttcacaagagatcgtacttcttagccattctttccccactccatattaggcttatcacccataaataattctaacgtccctccagctgctatttccgaaaagtccaagtagcatttattgtattcttcgccattcaacaaagctctctgtatatattgattttttgtgttgttatcatgtgcaatcaccgtaaacttcttaccggtatgatacttcggatcaagacggaactctattttatcaaataccgggctagtaatctccatccgcgtattccccggacacgaaggatgaatgccggaagccgtcaacacataccatgctgacatctgaccaacatcttcattgcccacaattccttccactttattataatatgcattcttacaaatatatcgcgtccacttctgtgtatgccaaggcacaccgagctggttgaaaaggaaaggcacgaaatgcaccggttcattggcatgattatagtagctattccacaacaaatttgaaggagtcttatcaaacatattcgtcagatcggctattaccttttcttttcctcccatcaattccaccattcccggcacatcatgaggcacaaaccatccctgctgataagcattggactcaatacaaccataccattctttcgtcagcgcatcttcggaccaagccacccatgatccatctgcattgcgcggacgaaaccagcctttttctttatcaaaaatatgatgatatgcttgtcccttttcataaaagtgcattgcatcttcttcttttcccattgcctttgccagttgtgacacgcaccaatctgcatacgcatattccaatgtataagagatactcagagtttcgggagtataacccaatgaatcatttccaaatttacgtgatgtattgaccgcatattgataagccttctctgtatcgtaagtgcgaatacctttcacataagcatctgccagtactgacaatgctgggttgcccaacatacaacctgaataggagtttaatatttcccaacgttcataatatccgcgtccgctctcatccgccatgctgatcaatgaattcaactgatcgctcactaaacgcgggttgataattgtctgcaacggaaactgactgcgaaatacgtcccaaccactaaagatggttcttttcgtaaatgtaccgtcgctcgtatgtacttgcttatcgcctcccacataacgtccgtctacatccgtataaatgcgcgggtcgatcatcgtatggtaaagtgcggtatagaatacagccttttcatcctttgttccaccggatacttgcacacgactcagttctttgttccacgaatcgtttgcctcctgttttacttgatcaaagtttttcgaagcaatctcctgcttaaagttcttcgcagcaccttccatatcaacaaaggagataccgactttcatctccacttcttctccttcttgggtaggaaactcggtgaagaatccaaggtgtttgccctccagttctttctcatctgtaatcaccgaagcttctgatactcgcgtcagataagtgatacttaccacttcgtcgcgtttccgggtccaatcgtcgggaatatcggcactccaaaatccataattattcagagacttattaaattgtgcatagaaataaacggtataatcggcatttccttcgccattcccccatccgccaccgtcgggagtacacttcatccagccttggatggtgtgaccgtctactactttcacgtattgagaggtagaggtaccacctactctacgtgctaaatcaatctgtatgcgtgattgtttgttggaaggaaaagtaaaccgtaatattccacaatgaggcgttgcactactttctaccttaatcttataatcagtcagttctacggagtaatatcctgcttttgctatctccgtagctttattataggcagagcgatatccttttatactatcgtcctcttttcctgctattttctgtaactcacctgtggtaggcatcaccagaaagtttcccaattcgccaaaccaacccactccgctcagctgcgtaaaggcaaatccttcgatggttttatgttcgtcactatatcctgaaccgttatccccacccgttatagtgttggggcttacttgtaccatgccgtatggagtggttgctccgggaaaagtcttacccaatccatgatagacgccggcagcacctacgctggtactggcaccaataaacggattgacatattcagcgggagtcaaatctgctgttaccacatcggtcgacgaacaggcagtcatccataaaaaagaacaaactattaaaaaagtagcagtaattttatacataacaaaattatcaatttgagttcgctgcacaaactacaattgcaactggctgaactcgcgttattattcggattttatttctatcagtctatcatgaaagtcttaatgccgaaacggggcattgaaatcgtcatttctgccttaccgtcacgtgtatttatcttctttctttcgatgcagtttccattcaaatcgacctcttccacaccggacaaaggcatacctaatgtaatcttacgccgcatatcatttccttctgcattgaaaagtcgcaataggatctttccattctgaagtttggcagcactcacctgatagccggtattctgcaaatcaacaaagaatttagattccagtcgggcggtagattgatagaaagataacaacggttcattccaacagtcactgcgagtggcaatagacgctttgtcccattttccacgatgaggaatgatggcaaatttcattttcaatggctgagtaattttataattcggtccccagagtccaccgccggaatactgtgcagtcaatcctaacggctcatcttctccgtgagaataagacgtagtatgatctgacaataaagccagtgcatagtctcctttttgttcggcaagatccacccagttaagaatgatattgtgcttaatctgatcccaacttccgaaaaaggtattatcgagtctgctttcgcaaacatcaaaaggagcattcttagagatgcgcgaaggaccaaaatctaccgggaagagtacgctcagcttataacggtcgtcgcaataggctctgcgattatcgcgccaacgggtttctttatattcaccgatgcctacgttttctttccaattgatggttagatcaaaatcaatccgcttctcccctcgtgaaagggtaatgatctgcgtaaacggatgcgatgcgatttcgccttccaattttatttttttctcatgcgcattatcactcaaaacagtcattattgccggtgtctccgtagaagaacggaacttgccttcttcataaaaaaatcctcttagttcgcctaaagcatatttacccgtttgcttggcaaattctttgtttccttctttcttagcaatcagacttttaataattcctcccttcgataaatcaaaaacgagtttatatatctcattctcgattacgtattccttctcatccacctttttgcctcctgaaaccgttcttttacctgactttttcttgatatgatacgtggaataaccgaagggaggaacttctgcttcaaacaacaaccttatttctttaccttcactttctattgaacaacctattttcctatttttccaatcactaacttctatttccgagtctgcatattcttgtggcagcttcacatttaccaattctactctttttgtgcccaaagtattataaatgcgtatgtatccctcttgactaccgacagccacaccgtccttatcaaagctctgcatggatgattcgattatccggtctgctatggcattgctactatccgtccatcgcttaatagcatctgcccaagtgccttgtttattcaaaccattatacggcacaatccatgaatcatgatgctgggcaagcattaaagtgcgccacgcttcatccaaatcagcctgtgaacaggtataaccattcgccagataagccatggtcgacatcttttccgccattaccatcttattctccgaagtgcgtacttcttgcgcaatcctctgcattacttggcttccccacatcagattgacacgcatctcttcttgtgtgaagtgatagtcatcattcgtcttacctactgaaagattctcaatataatctttccatgtcacatatatggagttgttttttatgttctttccacttcccagccacggaccgtttttccatccggcatcttggaagcacatacctaccggatgtttaattccggcatcacgacaatttttcagatacgtatccgaattgctccaagccgtagtctgccatgtagaattctcttctagtttttcacaagcataacgaggaacggtcagtatggaactaccatccggaccaatccagttgaccaactctccgccataggcattggagtatccgccccaacaagtattgggacatttcagcacggcatatttgaagccgaacaatttaagaatctgcggcaaacagcttgtgaaacaaggttcttctaccgagtaagtaacaaactgcacattagggaaatgcttatttatcttatttataccatattgaaactgccgtatgatgctctctcccgagatattatagcaataaggctgtgcataagtaggattggtaaattccacctgatcgctatttaccaccttcttcaattgacgataagcgtccggtgtctgtacttgtaccgtatcccatgtctcgggttcaatttccagacagattcgccattcaggatgattagacaactgatctacaataaattgggttttccatttcacgggatagtgcccatagattcctccatgataaccatctacgaagtaagcctgttgcgcatgaacatgcacacaaagaaaagttgctaataatatgataaaagatttattcatggtattttaaatctatttatttttatgttctttcatcttacgcattaattcatctaatttttgatgtgcaagttctgcatcattctctaaagttacacaattaatgagcactacaaggttttgagactcaataaactcttcccgtagttcatcattattaactacctccaacaggaattttgccttttcttcaaggggtaactcatctgttaaatatctatttattttgcttcccatttttcttccttttaagaaaggaacgattaaccaagcaaatccccctaagaatatctaaaaaatactatattttatgccgccagacaaattctaagcttcattcttattttttttagggctatccccatctgacattccaccgtttttattgaaattcccaaccgttccgaaatttccttgtatttaagtccttccagacgactcatcaaaaatatatcgcggcaacgcttcggcaaactattgatagcagcacggataagtatctctgtatcatttccctctaaaaaatagcatgcatcgaaccgatcaagagactgtagtttcagactcaattctatttcgaaactagtctgcgtgctttccacatatttctgctcagagatcttccgcttcagataatccagcgatctgttttttaccagtctaaatagataagcgtttacgttttcaatctcactcatcgaatctcttctttcccaaagatcagcaaacacatcttgagtaatgttttcagcgtcctcttccagcatcacaaattcttttgcgaatcgaaccagctttggataataagtaagatacatttctgaaaaattcatgatcgtgtgtttttaaattagttattcagttaccaaaaatcttgtgatgcaaatataggtatgaaaaaagcctacctcttatcggaagtagactgtaaagtagatgttttcaaagcatttctttgaataaccatctatttatgaatagattacacaatcatcaaaattaggttttggtaaaccctatagaatccattttaagacaaagaaccaagttttttcacctcttcttcgaataaattgccatccaagatagatattttcttcactttgctcttataattataaatggtctgaacagagtaatgtaagaaaacggcaatctgcccaacgtccgtaatacccatccgcatcaaagcaaagatgcgcaattctgtattcaattgatctttctctaacttataactatcttccggtttcaacaaagagttgaactcgtcaacaaagctaggatacagtttaaggaatgctttatcgaaattggcatataatccttccagttctttttcgaaagggcgggaagatgatttataaagttcatcaacctgtcccgtttttattttccggttcacattcttcctgtattcatcgagcttattgatgtagacagcacactgattcatgaaataacctacatatcgttctttgatcagattggcttcatcaagattcttgttcaactctaccaattcttcattcatgattttcagattcttctttgctcgagaaacaatcttggtctgcttataagtgaaatataaagtaatagcaagagctactacaaataaactggtcagcaagatgtaaaagcgaagattttgtttctgcttttccagccggatcagataggtattctctataataggatgtatacgcgcaattacagtgtttttaaaacgggagttatagaagatggcatcgctcaaagcaacctttacataattataggcccgatcaatatctcctttatgatacaagtttacagccaaggttaataatgcttcattctccttcactgccagttttatatcagtcatagcagctattatcaagtgcttttcttccaattcaggatttccggccatcttgtatgctctcgaaagtcccatcgacatcatagcataaccatgcgtatcgggtttctgtttatcgtagattctgcacaaaatctttaaagattcctcattttctccctgatcctgcattttaacggctttttctttggcatatacatcagatttatcatataaaacactcatcaccgtatcacgatacgcctctttcttcgccatatattcgttcgagaagcgggcatcatcagtatatttgataaggttttcataataacggatacgattccaacaataaatagctttcaaatagtcgggcaatgtatcaagatggatagatttgaaaatatcattagcctgaacaaacaagcccgatagggaatatacaaatgccagttgaagcctgccctccagcaagtacttttcattgcccatcttttgagctaaagcaatattttcatggatgtattgctctgcagaatcgcagacaaatgtctcatactgatgaatgatctcggtattcaaccggtaaagcttttccaatgttttctgctgagccttcttcagtttcaattcttttaacgtgattgccttcttttccgtatacaccatacgatcggaaatcactttatctaaaacttttaataatgaatcattcttatttcctgcatgcagatccaataaaaaatttaaaagaattgttataaaacagatagtgtatttcatattaatgtattatatctaattctgcaaaagaatgaaatttctctgagtaatcagaaaaaagcaacataaatcattggtttcattacatcttttaaccaaatataaattcttgcatacgtaattggaaagttagattaaaaaacatagcttaaaaaacaaaactataagcaagcaagttaaaaaatacttttttgtaaccccgactttgcaaaaaacatgaatattaatcctatatttgcagccgttaaaagaggaagatgaaacaaagcttaaaatacggactatttctggtacttgctttgctgatccatgttgtttctaatgaagcaatggaagataactgcagagtagcccccccgacatatcgccaggagaagtgctacgtatctcaggatcatcctgttcataatgctcttgaacgtcttcattatttctattctacccagtcttgtgatatgagtcacgcggatgttgcacacgtgcctacagataaaagcgtgcaattgctgattacttatttccgtgaatacaaaagccagcaaaacacgtctcagactcattcactccatattcccaagtacttttacgatcctattacatattatatatatggtttaaggaagatcgtcatttagacggtacaatccattatcttattcgtcaattcattacagttggtttcatccgggtgtggagaaactaattgtttatttctatataatattcaatctaaacagctattgaaattatgaattttacatttttagttgttgttttactgacagcgctcgcttttgtcggtgtagtaatagccctttcacgagctatttcaccacgttcgtacaatgtacaaaagtttgaagcttatgaatgtggtataccaacgcgtggtaaatcatggatgcagttccgtgtaggttactacctgtttgccatcctgttcctgatgttcgacgtggaaacagcttttctgttcccttgggcagtagtaatgcatgacatgggacctcaggggctcgttagtattctcttcttctttattattttggttctgggccttgcttatgcctggaggaaaggagctttggaatggaaataaccaaaaaaccgaaaataaaatcaattccgtatgatgagttcatcgacaatgagtcattggaaaagttggtcaaggaacttaataccggaggagcgaacgtttttcttggggttctggacgaccttgtcaactggggacgcagcaattcactgtggccgcttactttcgcaaccagctgttgcggcatcgaattcatggcactgggtgccgcgcgttatgatatggcccgcttcgggttcgaagtagcacgtgccagtccgcgccaagctgatatgatcatggtctgcggaacaatcaccaacaagatggcaccggtactgaaacgtttgtacgatcagatgcccgatccgaaatatgtagttgccgtaggcggatgtgctgtcagcggagggcctttcaagaagtcttatcatgtgctgaatggagtagataagattcttccggtcgatgtatatatccccggatgtccgccccgcccggaagctttctattacggcatgatgcaactacaacgcaaagtgaaaatagagaaattctttggtggaacgaacagaaaagagaagaaaccggaatttatgaaatgaagaatgaggaacgaagaattatgcaagaaatacaatttatagtccctgcagcgttacacgacgaaatgctgcgcttgcgaaatgaaaaacagatggacttccttgaaagcctcactggtatggactggggagtagcagacgaaaaagacgcaccggagaaactccgtggtttaggcgttgtctaccatctggaatcgactattacgggagaacggatagcactgaaaacagccgttaccgaccgtgaacgaccagaaattccgtcagtcagcgatatatggaaaatagccgacttctacgaacgtgaagtgttcgactactatggcattgttttcgtagggcatcccgatatgcgccgcctttacttacgtaatgactgggtaggataccccatgcgtaaagataatgatccggagaaagataatccgctttgtatggctaacgaagagacgttcgatacaacacaggaaatagaacttaatccggacggaacgattaaaaacagagaaatgaaactctttggagaagaagagtatgtagtcaacattggcccgcaacaccctgcaactcacggtgtaatgcgcttccgcgtttctcttgaaggtgaaattattcgtaagatcgatgctaactgcggttatatccatcggggtatcgagaaaatgaacgagagtcttacatatccgcagacattggcattgactgaccgcctcgactatctgggcgcacatcagaaccgtcacgctttgtgtatgtgcatcgagaaagcgatgggcatcgaagtgagcgaccgtgtcaaatacattcgtacaattatggatgagctgcaacgtatcgactctcacttactgttctactccgccctcgccatggaccttggagcactgactgctttcttctacggattccgtgaccgtgaaaagattctcgatatttttgaagagacttgcggcggacgtctgatcatgaactacaataccatcggtggtgtacaggccgaccttcatcctaacttcgtcaagcgggtaaaagaatttatcccttatatgagaggtatcattcacgaataccacgacatatttaccggcaacattatcgctcagagccgtatgaagggcgtcggagtgttaagccgtgaagatgcaatctcattcggttgcaccgggggtacaggccgtgcttcgggctgggcttgcgatgtacgtaagcggataccgtacggtgtatatgacaaggtagacttccaggaaattgtttatacggaaggagactgtttcgcccgttatctggtacgtatggacgaaatcatggagagtctgaagattatagagcagttgatagacaacattcccgaaggcccgtatcaggaaaagatgaaaccgatcatccgcgttcccgaaggcagttattatgccgccgtagaaggaagccgcggagaattcggagtctttctcgaaagtcagggtgacaagatgccttatcgcctgcactatcgtgctacgggattgccacttgttgctgcaatcgacacgatttgccgcggagcgaaaattgccgacttgattgccatcggaggaacactggactatgtagttccggacatcgaccgataaacaagagataaaaaacaagtattaagtataaagtagtaagtattaaccgactatgcaatatgatatacgctatattccgcatggaattaatacttaatacttaaaacctaataattaaaatatatatgttcgactttagtatagtaacaaactggatacatgagctgctgctctccgttatgccggagggatgggccatctttatagagtgcatagctgtcggcgtgtgcatcgttgcactatatgctattctggctatcgtactgatttacatggaacgcaaagtctgtggtttcttccagtgccgcctcggtccgaaccgtgtcggtaaatggggttctattcaagtgatatgcgacgtactcaagatgctgaccaaggagattttcactccgaaggatgccgaccgcttcctctacaatctggctccattcatggtgattatcgcctcgttcctcactttcgcttgtattccttttaataaaggagcggaaattctgaattttaatgtgggcgtattcttcctgctggctgcttccagcatcggtgtggtaggtattctgcttgccggttggggtagtaacaacaagttttcgctgatcggtgccatgcgaagcggcgcacagatcatcagttatgagttgtcagtgggtatgagcatcatgacgatggtcgtactgatgggcaccatgcagttctccgaaatcgtagaaggacaggctgacggatggtttatcttcaaaggacatattcctgccgttatcgctttcatcatctatctcattgccggaaatgcagaatgtaaccgtggcccgttcgaccttcccgaagcggaaagtgaattgacggccggatatcatacggaatattccggtatgcacttcggtttcttttatctggcggaatatctgaatctgtttatcgtagccagcgtggccgctaccatctttttgggaggctggatgccattgcatatcgtcggtttggacggattcaacgctgttatggactatattcccggcttcatctggttctttgccaaagcattcttcgttgtgttcctcttaatgtggatcaaatggactttcccacgcctgcgtatcgaccagattctgaatctggaatggaaatatctggttccaatttctatggtaaacctattattaatggcatgttgtgttgcctttggcttccacttctaaaataagaattatggaatataaagatcaaaaatatacgtacttgggaggactgatacatggtatcagcactctggcaacgggtatgaaaaccagtatcaaggtatacttccgtaagaaggtaaccgaacagtatcctgaaaaccggaaagagctgaaaatgttcgaccggttccgtggtacactggcaatgccccacaatgagaataacgaacaccgctgtgtagcctgcggattgtgtcagatagcttgtccgaacgatacaatcaccgtaaccagcgaaacgatcgagactgaagacggcaagaagaagaaaatcctggcaaaatatgaatatgacctcggagcttgtatgttctgccaactgtgtgtcaacgcttgtccgcatgacgccatcacgttcgaccagaacttcgaacatgccgtctttgaccggacgaagcttgttctgcaactgaatcatgccggtagtaaagtaattgaaaagaaaaaagaagtttagatatgggatcaacacttgaaacagtagtattctactttttggcagcatttattattgcaatgtccatcatgacggtgactacccaacgtattgtccgctcagccacctatctgctcttcgtgctcttcggcacggctggcatctatttcctgctgggttacacatttctggggtctgtccagattatggtttatgccggtggtatcgtcgtcctttatgtattctccatcctgctgaccagtggagaaggtgaccgcgccgagaaactgaaacgaagcaggtttctggcaggactctttacgatggttgccggtttagcgattatcttgtttatcaccctgaagcataacttcctgcaaacgaccaacctggttccgctggaaataaacatccacaccattggtaatgctttattaagcagtgacaaatatggttatatattgcctttcgaagcaatcagtattttattgctggcttgtatcatcggtggtatcatgatcgcccgaaagagataaataagtaagtattaactattaagtatcaggtattaggctgcgcaatgaatcgcaaggaattaatacttattacttaaaacctaataatttcagatatgatacacatggaatattatctggtagtttctaccatcatgatgtttgcaggaatctatgggttctttacccgccgtaatacgctggctatcctgatttctgtagagttaatgctgaacgccacggacatcaacttcgccgtgttcaaccgttttctctttccgggaggcatggaaggctatttctttgcactcttttccatcgctatttcggctgcggaaacggctatagctatcgccatcatgattaacatttaccgcaacctccgaagcattcaagtccgcaatctggacgatctgaagtggtagtgccaaagcggcacgacccaatttccattcggatggatatcgtgataaatatgaacaataataaaacaagtaattaaaataaactgtatggaactaacaattctaatactccttcttcccttcctctccttcctcattctgggaatcggaggaaaatggatgtctcatcggacagcgggtgctatcggtacgctgatactgggagcagtagtagtactatcgtacgttacggctttccaatatttctccgcccctcgtttggaagacggaacatttgccacattgataccttataattttacgtggcttcctttcaccgagactttacgatttgatctgggcattctgctagatcctatatccgtgatgatgctgattgtcatttctaccgtgtcactgatggtgcatatctactccttcggctacatgaaaggtgagacgggctttcaacgttattacgctttcctgtccctgtttacgatgtctatgctgggactggttgttgccacaaacattttccagatgtatcttttctgggaactggtgggtgtcagttcttatctgctgatcggtttttactatacaaagcctgctgccattgccgcttccaagaaagcgttcattgtcacccgctttgcagacttaggcttccttatcggtattctgatttacggatactacggtggcacattcggcttcacaccggatacggtatcattgatcagtggcggcgcttccatgcttccattggctttgggactgatgtttatcggtggcgccggaaagagtgccatgttcccgttgcatatctggctgcccgatgccatggaaggtcctactcctgtcagtgccttgatccatgcggctacgatggtagttgccggcgtttatctggtagcgcgtatgttcccgcttttcattgcttatgcaccggacaccttacatatgattgcctgggtaggtgctttcaccgccttttatgcagcaagcgtggcttgcgtacaatcggatatcaaacgtgtgctggccttctcgaccatttcacagattggttttatgatggtagcactgggcgtttgtacttctatggacccgcaccacggaggactgggatatatggcttccatgttccacctcttcacacacgccatgtttaaggcattactcttcttgggtgccggcagcattatccatgcagtacattccaacgaaatgtcagccatgggaggactacgcaaatacatgcctattactcactggacattcctgattgcctgtctcgccattgccggtattcctccgttctccggtttcttctcaaaagatgagattttggctgcctgcttccaatatagccctgcaatgggttgggtgatgacagtaatcgccgcaatgaccgccttctatatgttccgcctctactacggcatcttctggggcaaagaaaataaagagcttcatgctcatcacaccccgcatgagagtccgttggctatgacttttccgttgatgtttctagcggttgttacttgtggtgcagggttcattcctttcggacattttatcagttcgaatggagagtcttactctattcacctcgatctgtcggtagctgtcacaagcgttgtaattgcgattatttctatcgggattgccacatggatgtataagaatgccaaacagcctgttgccaatgcacttgccaaacggttcaatggattgtggacagctgcttatcatcgtttttatattgatgatatataccagtttattacgcataagatcatcttccgttgcatttcgactcctatcgcatggttcgaccgtcatgtagtggatggattctttaatttcctggcatgggctacgaatacgacaagcgacgagatacgtggtcttcaaagcggtcaggtacagcaatacgcatacgtgttcctttgcggagcgctggcgcttatcctgctgttagttctatagcaagtattaactatcaggtattagatattaagctgcgcaacaagtcgctgcgaattaatacttaaaacttaataattcaattatgaattttttatcaatcttcgtactcatccccttactgatgcttgccggactttgggcagcacggggaatcaaagcgattcggggggttatggttaccggcgcatcggcacttctgattgcctccgtcgtacttacctttatgtatttgggagaacgcagtgccggcaacacggcagaaatgctattccgtgcggatacactctggtatgcaccgcttcacatctcctactcggtaggcgttgacggtatttcggtagccatgttgttattgtctgccgttattgtattcacaggtactttcgcctcctggcgtctgcagcctctgacaaaagaatatttcctttggttcacactgttgtctatgggagtcttcggattctttatatccattgacttattcaccatgttcatgttctacgaaatcgcgctgattcctatgtacctgctgatcggtgtatggggttcgggacgtaaagaatatgcagccatgaagctgacccttatgctgatgggcggttccgctttcctgctgatcggtattctcggaatctatttcggttcgggagctaccaccatgaacctgctggaaatagcacagctacataatattccttttgcacagcaatgtatctggttcccgcttaccttcctcgggttcggtgtgctgggtgctcttttcccgttccacacatggagtcccgatggtcacgcttccgccccgacagctgtatccatgcttcacgccggagtactgatgaaactgggaggttacggatgtttccgtatcgccatgtatctgatgccggaagccgctaacgaactttcatggatattcctgatactgacaggtatctccgttgtttacggagcattctccgcttgcgtacagacagacttgaaatacatcaacgcttactcttccgtttctcactgcggactggtacttttcgccattctgatgctgaatcagactgctgcgacaggagccattcttcagatgctttcccacggattgatgacagccttgttctttgccctgatcggtatgatttatggacgtacacacacacgtgatgtccgcgagcttaccggattaatgaaagtaatgccgttcctcagcgtatgttatgtgattgccggtcttgccaatctcggtttgccgggattaagcgggttcattgccgaaatgactatcttcgtaggttctttccagaacaacgacgtattccaccgtacactgaccattatcgcttgttcatccatcgtgatcacggcagtctatatcctgcgtctggtaggcaagattctgtacggtacctgcaccaacaaacatcatcttgcgctgacagacgcaacctgggatgaacgggtagctgttatctgcctcatcgtttgtgtagccggactgggtatggctcctttctgggtaagccacatgattggtgaaagtgtactccctgtagtctcacaactcatcccataacctttattttttaatctttaattcttaatttataaagatggattattcacaatttctacatatgcgggaagagctgtcgctcgtagcagttttactattgctgttccttgccgatctcttcatgagtccggacgcacacaagcaaaaagggacgagacccgttttgaacaccatgctgccagttatcctgatggccatccatacagcgatcaatctggttccaggcacagctgccgacatttttggcggtatgtatcactatgtacccatgcacacggttgtcaaatcaatcctgaacataggcacgctgattgttttcctgatggcacacgaatggatgaaacgcgacgatacttcattcaagcaaggtgagttctatgtacttacactctccaccctgttcggtatgtatctcatgatttccgccggacacttcctgatgttcttcatcggactggagacagcttccatcccgatggcagccttgatcgctttcgacaaataccgccataactccgctgaagccggtgccaagtatatccttaccgcacttttctccagcgcactgttactgtttggtctgtcaatgatttacggttccgcaggaacactgtatttcgatgatcttcctgctcatatcgatggaaatccgttgcaaatcatggcttttgtattcttctttaccggtatggcgttcaagctctctctggttccgttccatttatggacggcagacgtttacgaaggtgcaccgagtacggttaccgcctatctgagtgttatctccaaaggttcggcagcatttgtgctgatggcaattctgatcaaagtattcgcaccgatgatacatgactggcaagaagtactttactgggtgactatcgcttctatcaccatcgccaatatattcgctatccgccagcagaatctgaaacgtctgatggcgttctccagtatttcgcaggcaggatatatcatgctgggtgtaatcggaggaacgacacagggaatgaccgccatggtatattacatacttgtatatgccgctgccaatctcggagtatttgccgtcatcactatcgtagcattacgcagtcagaagtttaccctcgaagattatgcaggactctacaagacgaacccgaaaatggcttttctgatgactatttcgctgttctcactggcaggtattcctccgtttgccggattcttctcgaagttctttattttcatggcagctttcgaagcgggcttccacttgctggtattcattgcactggttaataccgtgatttcattgtactactatctgctgattgtaaaagcaatgtatatcacgccttccgataacccgattccgactttccgcagcgaccgctgtacaaagtggggactggcgctctgcacactgggcatcatcggactgggtattgcaagtatcgtatatcagtctatcgataaactatcattcggaatataagaaaccgactctttggggctgactttttagtcagccccatcattcttgtctattcttccgacatcaccacaaaacagggaaggctaaaccaaaaacgcgaaccctttcccggttcggattccacccctatctttccgcccatttgttccacaatactttggcagatggagagtcccaggcccgtgccgtgtacaaaggagttcagcttcacaaaacgttcaaaaatatgtgcctgactctctgcgtcaataccaactcccgtatcttgtacatagaactccagttcttctcctttctgcttatatcccacacggatacttccctccgaggtaaacttaatcgcattgttcacaaaattggagattacctggtgcagtcggttacggtcactaataatacggcattccgcaagatgcggatcgaacatcagttcgacattctccttcaccttcatttgcatggagcggacaatatcttcacagagcatattcacgtctacatctccgttggtaaactcaaatgtacccgcttcaatcttagacaggtcgagtatatccgaaatcagttgtaaaagcaggtcattgttctccttcacaatctgaatatactcccgccgttcctctatattttccgtatcgacgagcaagtcggaaaagccaacgatggcattcagaggagtacgtatttcgtggctcatgttagcaaggaaagcacttttgagacggtccatcatttcagctttgtcacgtgccaggatcaattctttctccgtctccttcagttcggtaatatcatagttgataccgatgatttccacttcgttttcttccggattgtatgtcgtaacgactacattcatacgtatccagttccattcattcttcttgccgggacggcagattcgcatttctccctgaaagtgcttccggtttccttttctgacctcccgatagaaatcaaaaatacgttcacggtcttcgggatgcatattacgatagactcccaccacgtccgccaatggagtatcctcttcttcacctaaatttttataccattgtttaatggcatatcccttccggttcagcagattcaacttggcatatcccacctttgcataatccgatatgagcaggaagaaattctcaaaatcacgaatacggttcatcgcatcaatctgctccgtattatcaatgctaatcaggatatagccgttaaagtttccttcgttatcatagagcttgctgactttcgtatatatatctatcgtatcccgacgatcggggtgataataaccttctgcccgttcaaaagagtaattcagacggaagtctaccaaatcttcatcccgcacacggtcacggatatgctgcggtacgttcggattctcaaagaagttgactcctatcacgtcctgtttattttctacatcgaatatttccaggtccttattattcaggtcaatcaggaatccatccttatcatagatttccactcctgccgggatattggcaaagatactcttaaagagcttctcactacggtccagtgccctattggtcttcacggcctccgtggaatctgtaaacagacctaccacttcatctttttccggagaataaactatccaatgggtataaagctctgtctgcgggaaaaagatatccttttccctgtatgaattgttatccagcacttctttcagaaagaggagttgtgaagaaaaatccggatatatttcagaggccaagactcctatatacgtttcggcaggtcgggcaaagaagcgggaacaggccttgttgacatccgttatcttataatcaagaagctgaccgttttcatcacggacgacagacatccgtatataacctaacggcataaaatggaacagattgcttaaaaaagactgttcgcggacaacacgatctttggccttgcgcaattcgatgcaaatactgatgatattcgccaatgaagagaaccattgaaaatcctcattgctccattcacgatacgattcgaccagatctatacccataaatccccatacacggtcacctgccatcaaaggagcgaccatcaacgaacaaatgccttgagcgtcaaggaatttatattcatcctccgcttcttcgggcaactgtttcaaggaagtcagtatgatgggtttgccagatagaatctgctcacaccaccatcgggtttcattaaccggaatggactgctgcttgtttttctctttggaaacaccttccgaaacgacttcatacgtgcaactatgatgcgtatagtcttcgttatactcaaagatatacacacgaccgccttgatagaggctcagcacgtcattcaatatctccataatacaagaatctacatcgtcatcatggaggaagcgaagcaaagactgtgatatatagttttgccggcgtaacaggtcgtttacacgccggagggtatttttctgttccacttctttaggcgcctcaacacgctggatgacgccaaaagatttgtcacctccattggttccggtacctttctcacgaagagccagacgggtatgcagccaaacttcaccattttttaaacaaatgggaaaagtttgctcataaaagtctttatgaatatttgcgttagcacgaaattcctgtactatctgttcgcggtaatcctcacgtatcaaattctggaaatccatgaaagagatggtatctccttccagtcccaaaagatcacaaagaaaatcagagcagacataatgcccagccaaaaagtccgcttcccaccatcctatctgagccagagaagacattttacagtatcgctcgtagtttgtttgcataagtgattgatcatataataatgaatagcaaatatacgaaaaagaaaatcagcgaaacatataatatctgaaataattcataatagaagagagaggatagtagcagggatagccagggaggtaaaagcgtaataaacgcatctcattattatatgatttggcacggattacgcggattacacggttttagtaaatcataaccgtgcaattcgtgcaatccgtgcccgaaaagtaatacctactgtgaaaaagaaccgttggctacttcatcagaatgctgataaattatagcctgtccagccgaacagagaagcgtctgcacctgtattgtctgccgattcgacaaatgtattcagttcgccgttctgcttcaaccctgtgaaactcaatgtattggtgatatgaatgctggattcgatgtttcctgcacctttactgtctttcatatcaaccaggtcgatagctccacctgtacctttaaccaatgcattggtgatggtagcttttgctccgcgacgaatcttgattacatcttgcatacggtctacgttatcggcagtgttggcagcattattcacgatagtcatgttttctaccttaaagtcagactgacgcaggtgatccggatacagaccgtccatgttaccgtcggcttcgatgccgcgaggatcggcttccgtacttgtgtagtctctttcccaaacgccatagcagttcttcagcgtaccgcaatagccttgtgtgaagtcgaacatatcgtcatccggattaacagccagcaggttggttacatttactgttccgccaaagaactcgattgcatcgtcggcactttccagtacgtagatattttcaatctttgttccgttgccgacaccgttcaaggtcagtccgttgtgttcgatgtctgctgtggagcgtgcacctgcgtagcagattttcacgtaagtcaatgaaccggagttgtcatcagctgcgctgccgccgtatttatagtcattgttgatttccgtcagtgccgtatcgctcttgtcggtctttgaaccggaaataggtgctttaccattgatgatcacgccaccccaatatccggataccgggctggtggtatttgccgtaaagacgattggtttgtcggccgtaccgtcagcatagagtttacctccctgcgctaccagcagataactgctgaaaccttcacgcgccttgatggtagttccggcaggaatattcaggcgaccgccgtcggcgatgataaccgttccgttcagaatgtattctttggcatccagtgtctgttcaccggtcagtgttccggacaggatgttttcgcctaccacgatagagctacctgttcctccgccatttccaccgttaccgtttccattgtcatctccgtcactatcactactacatgcagtgaatgtcagtgcagttgccatagcggcaaacgtcataaagtttacaaacaatcttttcattttgctttaataattagttaataatcttatttcattatccggtttaaaatgtgcacgacactcccagactgatatttattccttttttataatcgctgagtactaccttctctccgctttcgttggctttgcggctcaacttataagagggattcagcagattgcgggctttcagcgtaagtgagacatacttgttgagtttggcttgcgaaacgaagtcaagcgtcatcattccctgctctatgatgtcttggtagccttgcgtaccgatggtataaatcttatcgctgacatagttgaataccaatgtattaatgaagctatgatttcctttcgtgaagttgtgggacaagtcgaaattggcgatccagggagcggccccttccagttgcgatccggtggtaaccgttgccagaggcattttcgcatttgtataaatgtacgatccgttcaagccgaaagagagcttattcattccgtttgccgcactgcttagcggacggacaaacagattcttacgtacttctacttccactccggccactgttgccttatcggctatattttcatacgaaaggtatcctccggcacttgccacttcaatgcgtgagatcggattcttgatgagcttataaaaagctgtcagagagatcagttcagtgggggtaggattaaagtcccatttcaaatcgacgttatagttgtccgaaggcttcaggttcgcattcccctgactgttgaaattcacacctacgtagcgataaggagaaatttcctttgcttgcggcagcgtatatgttttgctcgctccgagacgcaaggaatgtttttcactcagattgtatttcagattcagactcgggagaaagaaatccttttgaatcgtgttgcttccttccgatccgcctttattcacattgtagtctacctgaatatccacattgtcatacttcattcctacatttacaatccaacggggagtaaactggtaggtggcttccgcataagcggaatggatattcttggcgaccgaatacttatcgatgttcttctgaacggtaaaccatccggaagagagattctgctgattataataatcgtcgagtgagaaattatccaatgaggggatggaagaagcgtgtcctactgtgaggttgtattcagtcgccttgaaattgtcgtctacaaatcggcctgtatagcccaagcgtatattagagatttcttctacgttatctttcagacggtagatgagtcctgcctttacgttgatgtcatcttcgtccaaagtggagaaataccgttgctgggagttgcctctgagtaaggtatatccttcttccgctttggttatgttgttgattcggcggtcgggttcattgcctttcacgatattataagaagcaccggcatccagactcaatgttttggtcagtccccagttagtcatcagctggttaacgattagtaagttgtcattcgcttgctggcgacgggtaaatccctgattctcataatcgtcactgaagatggagtttttaccggtatagtctcctacggattgcacattggcatgaatcatcatgaagttataactcatgtggtgacggttctgcatatcataatccacattggccagtgccagttggctgatattctcggtgtacttcttgcctgtcatatctttgtagatcgtaccgctcgtcgttgtgttgcggatggtttcatccgtaaattgataatcagtggtatgtccggcagtgagaaagaaagagagcggattcctgtcttttcctatatgaaaccgctttccaccggaaatgctataactccggtttatctgcaagctctgcttggaggggtccagcttattcttgaatccccagttgttttcatcggcgggttctgttgtagtggtgaagcccagaaggtttactccgtcctgtttcagaaagtcggctgtcacagtctgcgtgttcagtcctccggaaaggccgatattcaggtttccgctgccaatcagttctttggaaacaatgtcgattgtcgcaccgccgacatcactgatacctcctgcattaaatgccttattgacgccaacagactggataatatccgtaccgaagaagtcgagagagatattcttatattccggatcttccgaaggaacggcaaatccgttaaaggtagtcgcattatagcggtcgcccagtccacggacgaaaacattcttcactccatcctgtttggagactcccgccactttggttacagccccttccgcatcggaaacacctttgcgtgaaagctctttgacgctgacagcctgcacggcaatgaccgccttctgctgttcgagcaataacatattctcattttcacgattcttctttgctaccaccacaacatccgaaagttcgtgcgcatctgtctccaattccagattcagaatcgccagttttccgttttctacacggaccttacgacgtacttccgttttatatcctacatatttaatctctatatcatacaaaccttccaaaacaccggtactgttcaattcaaaattaccgtccatatcggtcacggctccggcaggagttcctaccaaccgtatcgttgctccaatcaaaggctctttggaaagtttatctttcacagcacctttaatcttaatattggcagtcaatgcgggaagaacacacaacaaacaaaagaaggctgcaactgaaaatcttaaaagaaatagttttttcatcgaacttcgctctacgtttttattacgtcggcaaaggtagacccaagagattacaatatgaatacgaatcagatacaatggtttgaaatagccgtttcaggtttgttacatcgtgttacaaacttgttatcaatgacttaccacactgtttcaatccgcttaccaatgagatttagtcctcttctacgtaagatttaatccgcatatcaaaagaatttatctcccgtcatgcacagaattaatcgtctgactatagttaaacttgcgtctgacagttgttgttttttggtgtgacagttgtgagacgaaaaaacaacaactgtcagacgattagttttgtacctaacggagaatagatgtcagccccccgaagaataaatcttaggaaacaagactctaaattcaacacgattctaagctaattattagtcagccctaatagagaaacagactagtaaagtatgcgaggagacagagaaattagatcagtttctttttcttccggtagttctcgcgaaactccttcggagaacaatcctttttcttcttaaagatacgattaaaattagacaggttattgaatccgcactcataacagatttctgcgatagacatcgtagaatctaccagcaaccgcgaagcgaatcccagtcggatatcaataatataatcggaaaggttcttccccgtacgcaacttaaagaaacggctgaatgacacatcagtcatcccgaccatgcttgccaactgtcccaatcggatttcttcctgataatggagattgatatattcctgcaccttctgtacccggcggctatcggaatgaacatcaatcttggcaaaagaagaactggacagtgtccgggcctcttcctcaaagagagaaagttcatacaggatcgtcataaacttgatcaccgcatagaacccttgtttctcggaagcaagcgtatccagcaacggatatatcttaagtatggcggacatcgggaaacaaagtcctttctgagctttatccagcatccggcggatagagtcgaactggttcttattgataaagctcttgaagaacaggtcggaagagaattggatggtgatctcccgtatctctttggagcggcattcattctgttcccatacgtgttccaagtctttgcccgtaatcagaaccagatcataatctcctatcacttcggaggaatctcccactacacgcctgactccggcggccttttccgtaaagttcagttcaaattcagaatggttatgaatcggataggtaaactccgtcttataacgttctgcaatatagaaacagtctttgtcggacaaaggtgtaatttcacggataatctgattgggtataggtgtgttcataatcaataatggttaacagtatgtatcgttcttaaaatatatagtattctatcttttaaatcagtgttctatcttcactcctatccgtcgcaggtcttcacccgacggattctgaaagacgcgcaggccgaactccggaatgatggcaagtacatggtcgaacacgtctgcctgtatgccttcgtaagcaacccatactttgttggcagaaaagaaataaagttccagcggaatgccggtttctgtaggctgaagctggcgtaccatacaggtcatatcctgattaacagtgggcaggctccgcaaataattggtcagataggcacgaaaaactcccagattggtctgcctccgcccgttcaccaacacggaattatcaatatcatgctccttattatattcttctaccactttctccgtttcatctacgtaatttgccagcaactgtatcttgcgatatttttccagcatttcgggagtacaaaagcgcacgcttgtcatatcgatattaatggaacgcttcacccggcgtccgccggactcctgcattccctgccagttctgaaaagaatcgctgatcagcaggtaaggaggaatggtcgtaatcgtattatcgaaattacgcaccttcacggtattcagcgttacttctatcactgtgccgtccgcaccatatttcggcatggtgatccagtcgcccaccttcagcatattgttggcagaaagctgaataccggatacaaatcccatgatactatctttgaaaaccaacatcagaatagcggcagacgctcccaatccggtcagcaagaccatcgggctctgattgatcagaatgcttataataatgatggctcctataaagaaaagaatcacttgcgccgtctgcaaaagtcctttcaacggtttgtcccgatactgctcccgctcactgtagacttgatagacagccgtaaacaaagcgctgatgaaacgaagaaaaacggcaatgatatatatcagacagagacgcctcagaaaatcgagcaaatcagaatccgcatgctcggggaatgcgataggaatggcgatataaatcaggataggcgctaccatccggctgacattcaccatcactttatggttgaatacaatgtcgtcccaggtagctttggtctgcttcaccaacttggctaccacccgtaaaatgattttacggcagattatgttagccaagaaagctattccgataataaacagcaatacgatcagattatctattttgtccgcccatacttcatccacacctgccgagagcaacgtacggttgacctcctgcatcacgacattgccaacattctccgtatctccatttgccaatgccacactcactgtatcaatcacttctttcataaaatagtatctcttttagtttattcccttattagttagttcccttttattcattctcctttggccagatattcctgaatgtcctgcctcagccagtcgtagtggaagagtcgcttataggcgacgttcttcttcaacatgatttcgacattcacctggctgttctgataacaagtcaattcattcctgaattgttcattatgttccgccagtcgtttgatttcctgttcccgttcccggcgcagggcggtacagacgggaatcagaagtttcatcacgacattatccatcacgtgatgtccctgcatatataaataggtggtttcggggacgagtcccagttcctttaattccgaccgcaatccgttcacttggttgacagaaccggggaagcgttttttcagttcagcaagtttctgattaactcggtgttgcagtgcttccagactgtgttccggatgtttcagactgatctccctcaaggcagtataagtatggaagtcgtacatcgggaaagtatacgtatcccgttgacgataaaaccacacgttccacaggaaaagtgggtatacgatttctgaataccgtttcagataagcgttgaaatccagtataaaacggtcgttcaatgtggcctgcacacatacttcgtgaagactttcggcaaagcagtgatagttttcgatagcgtatgtgtaggtttggaatatgtacttgttccggttgatctttcgggaagtgttcgtggctccctgcaacaggaaatcatagtcactgtcgacacaggcaatcagacttttgcccagttcggcggtattcagcgtgttcatgagtaccatcttcttcccctttgccaatgaggtggccgaagggagcatcacttgaaaataatgctcgtcatcttcaaactcttcgagtaatgtgcgccagaaagcaacatcatcatagctctctacgtaagcaatgatgcgccggcgagcctttttggaatacagcttgtgggcagcattgaagtaagaagaagtcagattatcgcgtagtgaagttgccatgtagaagttgtcattaacaattaatagtcggggtgagtctgaatccgtccgcttcggtggaaatatcgctcacctctgtcactgcatccagccagccctccatgatgacggcaggcgaatgggtggtcagaatgatttgcacattgggattcagttctcggatcattgaaatcagtttctgttgccattcgatgtgcagggaggcttccggttcgtccatgaaaaggacacagtggctgttgtcctgcacgagcactgtcagcagaatcacgagcatttgcttttcaccggacgagagtttgtatggaaacagcaattctccgtcctgatagaaggctatgtcattccgacggcggtctatctttttgcgggtgtagctgaaaagttcgtcaatcatatcctgaaaacgacgtttggcaagggagagggtggcggctttgctgcgctgttcctcgtcattgctggaaagcatttcgatcatcttattgcctatattgacctgataatcgagatagcggcgctgcaacagatacagttgccagtccagttcggacttcacgttcttgtctgccatgcgtgccgtgaagtcacccataatcaaggggcggtcgtagctgcggatcacatcgtatgggatataagtcgctgcgggattatcaaagaagaggtgtactccgttctttgcgtcgcttttcatttcaccggagagctgtatgtcgccggaaagctgttcgaggtatcccaccgaacggttcagaatagtggtctttcccactccgttgatgccggaaaggatattcacatccggacgcaaatcccattgtatattaaagcggccccagagtcctttgatctcgatccgccggatatagtctgcctgttgttccataatattcaattttaatcaaggcaaatataaacaaatcatgcgacaaattggttacctttgcagcagttttcaataaaggtaacaattaaaaggtatacacagacttatgggcaataacaagaatctgcacggacatctgtttgcactcacggcaaacgttatgtggggactgatgtctcctatcggcaaatcggcacttcaagagttttcagctatctccgtcaccacgtttcgtatggtaggtgcggcagcggcattctggatactttccatcttctgcaaacaggagcatgtggaccaccgcgatatgctgaagattttctttgcttccctctttgctctggttttcaatcaggggatatttatcttcgggctttcgatgacttcgcctattgatgcttctatcgtaacgactactctgccgatagttaccatgattgtggcagccatctatctgaaagagccgattacgaacaagaaagtactgggtattttcgtgggagctatgggagcgcttatccttattatgagcagtcaggcagcgagtagtggtaacggaagtctgatcggcgacttgctttgtctggttgcgcaaatcagtttctccatctatctgacggtgttcaaggggctgtctcagcgatattcggcagtaaccatcaataaatggatgtttatctatgcttcgatgtgttatattcctttctcttatcaagatatttcggtcattcaatggaccagcattccaatggttgccattttgcaggtattgtatgtcgtactgggaggaagtttccttgcttatctctgcatcatgacagctcagaagttactccgccctacagtggtaagtatgtataactatatgcagccgattgtggctacgattgcagcaatcctcatgggaatcgggagcttcggctgggaaaaaggaatcgccattacacttgtgtttctgggtgtgtatattgtgacgcagagtaagtctaaggcggattttgagaaggcgggaaaggagttgtagaagtttcctcataccgataaaatagagaaaagcatcaatggggatgtgtcgaaaccctcataaatttagaaggggaaacacattcccattgatacttttcttctatatattcagctatctttagttagccagaatcgttatctccgcaccggacgcaaaatcctgtccgttctgttcgcttaaagccgtgaaacggatataacgtgccttcaccggtttgtcaaacaagactctcttttctttggagtcccttgcgaacgttcctttattaacaggctctccccattcttttccatccatgctgacctgaatagagtaatccttgatattaccgtttcctccattctgtcgtggcaggtaagtaaagcctttgatttccttgacttcaccggcatccaaatctacccaatgcgggtatttggcaactgtcaccgaatacatggtatgccagatggtattcggatcaccatcagtcagatgagaagcatcgccttcacccgattcctgactactggcgtatacgacttgcgtctgaatgctttctattttctcaaacttcatcgtgctgctgatatccttactatccttataccatgccttgatcgtacccccgttacgcatagggacaggctctgtgtattcctgcactttcttacttccgtcaatgctataacaaatgacagcatctttctttgctgaagtcaattcgaccattccgacaggggtgcgtgtgatagacagaggaagatctcccgcaggggcaacattggcaacgacactcagttccttaccggcaggacgaatgatgaagcccatgctgtgctgattggcaaacacacggtcgtgtacgagaggacctccctggccacaactgttaccacccagaccggtcactgcacaatccaaatgcagataggtatcgcctgccttcggcaactgataaggatgggaagccaaaatcaagtcgagagccgagtactgaagtgccgaagccgaaagacggtcggtagctacgaagacagctccattccctgcctgattggtcaatgcacaccagcgaacatcttcgtgattgcccatatcctgaggttttgggaagtttacgaactcacctgctacgctattcgtatactgttcgataaactgtccgctcttacggtcggcatagttatctatcggtccgcgtccatagtaagtgaagttactgtattgttggggaactttcatcacataacccaaacgtggcagaaccaaacttgaacgattggaagtaatgctggactgcaattcgatagaaccgtccggatacactgtccatatctggttagtgacaaatttaaagtcattgctaccgaattttctgtcggtcagttcttcgatgctattcttaccggagcttgtaccacccttaatgcgtgcggcattcggtgcctgagattctaccgtaaaactcaataccaaagtgccattgcctttattcaatactttatattcagttgctttatgaatcagattgtgcaaaccatgttcgaaccagggggcatagaaccagttatcattgtttgtaaaagcacggagagcatcgagcttcggaccgttgccatcggcgataacagtctcgttgccatacttcagactgtagatacttccggtttgcgggtcaaatatggcttcaaagtcagctccctttataaggatgcgcttcgtatccttgtccagtatgaatccatccagttttgctgcaccggcagttacttcactgatggacgggcgatccgtagcctcctttatcaaaatctgttcctctgccatcggaaagcctttggcagcccaaggtctttgatctttcagtataaactgtagtttcataaagtactcagcatctttcttaagagaggcatgatcatacggcagagtgatctgtgcacgttggcgtggagctatattgatatccatcggtttaccggtcattatcggtttaccgtcttcataaagcgaatataccaactggtaatcttccgccaagttcttaaagtagtacttattgaagatctcaaatacccccttttctgtatctattgcctttacgccgatgtgctgatatacctttttcacttcatagtactgaggcttcggttcaaggtcaccaaacacgatgccgttcattacaaactgaccatcattgggagtatcgccaaagtctccgccgtaagccagataacggacacctgtcttcgggtcataattgtacatagactggtctacccaatcccaaatggcacctccacagaagaaattggtcgactccatagcttcccagtaatctatcagattaccgcaggcattccccattgaatgggcatattcggatatatggaacggatacttgatatcatatttcccctgcacggccccacgtacccagccgatagacggatattggttggaacccatatctacaatgtcattattacgctcatattgcacaggacgggaagtatcaaacttcttcaaagcatcataagccgccacaaagttcttgcccggtccggcttcattgcccaacgaccagataacgatagaaggattgttgacattggcacgcaccatttccatcacacgtgccacgtgcgcatgtttccattccaccggatgagagagggaggcagcaccataataatattcgtgcgattctatattcgcctcatcttcgagataaataccgtatttgttgcacaggaaataccaatacggatcatccggataatgtgaattacgtacatgattgatgttggcacgcttcatcagcataatctctttttccatcatctcacgggtaatggcgtgccctactcccggattggattcgtggcggttcactcctttcagtttgaccgtctttccgttcacataataataacgtccggcaagtccgaattcatcttcggaggcaggagtatccttaatctccactttgcggaaaccgacaatggtggaaaccatttcaacggttctgttcttcttatccttcaattcggctaccaacgtgtagcgatacggaaattcagccgaccacttattaggagcctttaccttaagaacagtctgaacactaccggtttcattcggagcgattttgtcgatcacaggagataagaatccatctaccaaggtattctcatcagaatacagtttgttggcatataaagagtaatataccttgtagtctttgatggctttcttatccagattacggatttcggcattgacagtcagagaaccgtccgtataagtcgcatccaaatcgggtgtggcaaccaagtcacggaaatgaactttgggaaccgagtacaaggcaaccgtacggaagatgcccggcagacggaacatatcctgcgcttcgaggaaggaaccgtccgaactacgatacacttcggcggctacggtgttcttgcctttctgtaaatagggagtgatattgaaattagcggtattacgcgaattcttggagaaacctacgtactgaccgttgatccacagatagaagaatgaatcgacaccatcgaagctgataaagacttcgcgtccgtcccagtcctgcgggatttcgaaatcacggcggaaggaacctacttcgttccgatccttgtaagtagtccagttggcaggaggagtacgcatcacacctccgcgccagtcatccaccttcacgctgtgctggaagatgaccggttggttgacgtagataggcgttccgtacttctgacttccgtccttttgaatgccataaatattccagcttgaaggtacaggaatcgcatcccatgagctgacatcatactcagtctgatagaaatctttggggcgggagtcggggtcgggtgcccagtgaaacttccagtcaccgtcgagtgactgccagaacttactgttttccggcaataccttgcgggcattatccaagtgctggaacggaaagaaataagcatgcggctgctctttgttgagcgccaggttttcgggagattcccactcttttcctgtaggagcattcaccgaaccataggtgaatccttctaacggttggtctgcaaagctctgtattgacaaactacaacacaaaagcccggttaataaggttttgttcattaggtgtaaagttaacaattggttattaattagggtatagttatcgggggtaaatgctcggtcgtttttctaatccatcactgtttctgctttatcatcgttttaattcgtcaaaataggtatccagcaggctcttagcagcgataaacgaagtaagatttccctgcagcacttgttgttccttctcctgaagcatcgcttcaatccgaggattgtgatagaagctatcacggagctgttcattgatcgtttcgtacatccagtacttgctctgttcattacggcgatagtcaaaataaccgttcttcttcacgaagtcgatatattcatacaccatgtcccagatttccttcacgccgatattataaaaaccggagtaagtcagcaccttcggaatccatcccgattcgggagccggaaacagatgcagcgcattacggaactggctggcagccaacttggcaggttccagattatctccgtcggctttgttgatgacaataccgtccgccatctccatgattcctcgtttgatgccctgcaattcatctcccgtacctgccaactgaatcagcaggaagaaatccaccatagaatgaacagccgtttcgctctgtcccactccgacggtttccacaaagattttatcgaatccggcagcctcacaaagcacaatcgtttcacgggtcttccgggcaactcctcccaatgaaccagctgaggggctggggcggataaacgattggggatgtacggaaagttgttccatacgtgtcttgtctcccaggatactgcctttactgcgctcactgctcgggtcgatagccagcaccgccaacttaccgcctttttcgagcacatgcagaccgaatacgtcaatcgaggtactctttcccgcaccgggcactccactgatacctacacggatggaattgccggaataaggcaggcacttctcgatcacttcctgggcgacagcctgatgttcgggcttcacgctctctaccagtgtcacagcctgactgagaatagtgacatcgcctttcacaataccttctacaaattccgctaccgaaagctgacgctttttgggcttacgtttcaaataaggattcacggatgagggctgttcgatgcctttattgacaacgagtcctttatattcttcgttattttcaggatgttccatgataataagagttagcgtttgatatttatttcaactttcggacgcaacgggtcgtttgtaatcatcaagatacgtaaatgatgtttcttattacctacatcccgcttgtggatcgtcactttcaacttggtcattccgtccggcggaagtaccgtctttttcagtcttactcctacagaagagttgaatacctgtagcttgctgatgactaacggggtcttgcccgcattagcgatcaatatatcatggctgactttattcttcttgatcaacggaatactcaggtcaatattcgtctccgagatgtggatggcaggagcattcaaagaatctttctccgtcatacgcgagaaatcgggaagaagaatggccgaaacaggtatctcattgtcttcactcactttatcaccggagaaacgggacaggtagacagcggtctgtgtcagcccgaagtcctgcagctggctggcatccagtgtcagcttgatcgttccttttttacctttcagcagtactttaggttccgcttccatcttcagataaggaggcaggtgcatcaataccggttcgtacggacggtcggaaaggttggcaatgctgaacgtcatggacggttgctgtccgcgatagacatcgggaaaggagaactcgtcacggtcaatgcggatattgccgatggcatacggaagaagtttcgaataatctttgatttcctgcactacctcaccggtgaatttcagataaaccagattcggagtggcattgctgtatatgcctatcgacttgtcaaaacgtcccagcgctttcgcgtcaaaagaggctttcacggttcctttggcacccggagcaatgggttcctttgtccagtcggctacggcacaggcgcaggaagtcgtgacattggtcagcaccaacggctcgtttccggtattggtgatggtatattctactgttaccggctttttccattctatttgtccaaagttgtgcgtctccttgttagaggaaatacggggttgggcaacagccgccaaagtgacagtaagcagagtaaatatcaatagtaaagtacgtttcatgtgatatattttattttggtccacaaatgtaggagttttagatgagtttttcatcacagattacatagattaacaccgtttgagaaaatactttacccagtgacaactcctgcaacgcggtattcatcaacaaaaagttccccaccgatgaaggcagccttcatcggtggggaacaccttcctcatcggtggcaagtgccctgctcaccggtggggaagaaatcttctctgtgcgttatttaataataattgtcatcgaagccgagtgcgaagcgtattccggcgcataggcgcattgcatggttgccaaacctgtctcataggttcccgctctgctgatacgatagctatgctccaacacatacactccttttcctaaatggtcaaagaagaaattggtagaagcatccttgatgtctacgtaatagccgattccattactccagttgtaaccggatacgctgccgatcggttcgaagcaggcgccccgctggtctttcaactgtacgaagtccatcggacggtctgcacgaatgctcaaacgggaaactactttatcgcctacctgaagaacggtcttttctgtaataggctgtagttgaggagcattgttcaccatacgttccacatacagttgcttttgcacattcagttctcctccctgttgtctcacatccttgatgggtgattcatattccgcataaacggctccccacgcgatgcccggatttctcttttcgacttctatcttacgggcgtccactacattcttctgtgtaaacgagcgtttgatatagcccagtcccggtacggtagtcttacttggagagacagtttccagcacctcctttgcaatgacaatacgcacgtctccctgattgtcgagcaggtttacgcctttcatcagtaaggcatagacagcatcggcagtagctaccggagaattccactgttgggtctgtttctgtttgagcagccagagtttcatttcttctacggtatcgttatttccgcctgtcagttccagcgcttccattacgtctacatgagcctgcattttcattccgccccaggtatacgggttttcattgaaggcgaagaacattccctgttcgtccgtcttcgtcagatgttctttcagtgaagcgatgaactcctgagcttctttcttccgtccggccttatccagaatgatagcggcaatcgctttcgtatccatcgaagcggtcggaagcatttcgcctatcttggacagataataggtataggcggctttattggaagccggaacttgttcgccggacagagcgatcagatacagatattgcaggatacttccggaaacacctgtaaacttcacaccgtctttctgtgctttgagaatttctctatattccttcagagcttcctgatggagataggtaaaggcattcttctgcaaggcaagcgccgtgccgcttggttgctcacctgtcatcatagccagacgggcattcaattcggcaatgtaggtagtgacgtaacggctgccggtcatacctttataccacgaccatgctccgcttgaattctgcaattcctgcaatcttgtcaatgcggcaatgttgttgctacggatattgttcagatcgaacagagtggcgatacgttctttctgctgttcttccgtttgtgcttcgagtacccacggagattcggataacaggatattcttcacttcctggttcttttgcaggttgctcaggaaggtatcctttgttccaccctgtagcttccagctatcgaatacggcttttatacgcggctggctgttcatgatgtaggaagccagtgtatttgcgtagtaagcggtagcccatgaaatggcattattattttccggaaggctcaatgaaggcaatgcctgaatagcataccaggcaggatttccggtaaattcaatggttagtttacggtcggttgccgtcttactgtgatgattgaacaggctgtcgagagagaaagtacgtgtttcttctccacggacaggcatcggaagcgtttctaccagatgctctttattgctgagcaccggaagtaactgctgttcgccatcactgaaggtaccgctgtcggctatcatccggcatcccagtatctcgtatttatcactcacggtaaacatgaagctgacgccgattgtctttccggcctctacggtaaacttctgtttctgtgtgctgattaccttttccgtcatcggatcaaagagaatcatgctcaccgtaccggcctgcggctttccggtcatgttggaaatggaggcggcaacagatgtcttatctccgacacgtacgaaacgaggcagattaggagccagcataaattctttgcttgtagtggcttcaccgtccagtgtgcccatcagcatacctttggtatgagaatagccacggaagttccagcgggtcaggctttcgggcatagtgaaggagaaggaaacttcgccttgttcattggtacgaagttgcgggtagaagaaggctgtttccgcaaggttcgtacgcaggtcggcgggagcttcgggaagggtttcttcctcggatgcgccgtccggcttgcctgcctctactgacaccaactctgattcaaatactgcatcctcagcaacacttccagccaaagcaggtacatattttgcttccgccttacttctcgaaacgccccgtatcatcatactgcccgtcattgaggcctgcttttgcacgccatatcctctgaccatcactcccggcaccattccattcaacgcctggtccatcgacatcgttccctgtgtcacaaaatggtcaaattccattgccggcactttaaggtatttatgattccaccagtagttgaaggagttattaccgaaataaccgctcatccaattggaataagggatgatctgattatagtaaatactgaaattctgttttctattccatatcttatccaacgaggcatcatacatcgtagccaacatttccgcttcggcagcctgcccttgcggagtatgaatcgtcagtttccattcttccttttgtccgggacgcagtttatcgcggaatacttcccatttcatggtcaatgtcttgtccggcagacgtttctttaaccggacctgttcctgatatacctgtccgtctcttaccagacagaagttgatgaagactccgtccccataactttccttatacggatagtaaaaatgtactatcgtatcggacaaattcagaactttgctttccagcaactcgttgccggagaatacattcatcatcacataagcatctttctccgaagttccgaagcagaactttgccggatacgccgcatcaaactctgtattcgcctcatagaaccatacgggcgtttcaacaggcggacgtttatcttcccaagcgaaaagaatcgtattcgcatcagccgtcacgtccttgccctgtccgtctttgacgactgctttcagcacataaggtccggaaggtaggtttccccaatgaatcgtcatctcttcgttggaagtgaatgtgcctgtcgcaacaggtttctcgtccagtttcttgaagtcggcatctttggcctgatacaagaagaatgtgcccttcacttcaacaggctgcccattcagattctgtaccttgaataccgtatggaacggcttatccttgcaaatcttatcactcaattctgtctgtaaaaccaacgaacgattgcccgccgagatcacatctgtagacgactgcgtttcacccgccacattggttgcagtggcttctaccgaatagcggtagtatactctggcatcattcttataagcatcattttcttcgagacgaaccggtattgtaaattctccgttctcattggcagtcacctcaccggaagcaatctgcgtgctttccgcaaaccgccacaggctaaaggctgaacgtttcacggtatacttcacaggaagatcctgcaataaaacgccgctataagactgtatcttaccttttacttctatctgatctcccagttgataacttcccgcctgtttctcaaaagttatatcgaatgtcggacgcttatagtcttccacacgaatacttgtcctgctatttccgactatcaacgagaacattccgttcagacaggcagaaggtagcgcaaaatcagtggcaaatgacccgaactcattcgtgcggacctttttctgtccgacttcctgattattcgcatctgtcaatatcacggtatattccttattaggaagcacatttgccgtatccgctttctgcgtataagcgattcctttcacatatacagtctgtccgggacgatacaaggaacggtctgtcaacaaggtcatttgttccgaagccttattttcatctccataatatccataacttccgccatagacaccttgaagcggcatagcggtatcggcgcctttggcagccttcaaatatctataatcggatttccaggggaatacaacttttccatccgtcccggtcgtaaattcctgcaataacttttcgtcatttgtataaagagttactttcgcattcggtataggatgtcccgtctgtccgtccagtgtcactacttcatattgatttcccggcaaacggcaagtcaatgccttgaaacgtgtaacattgaatttgctttcactgtctctctttgcacgaatatccggaatgatacgcatgacatattctccaacttccggtgcctggaatgtaaacaccgtatcctgtgcccgataatcttccggacgcaggactgcaaaatgctgctccttgatcaatttctttgcctggaaaagacgaagtgtgaatccgtccagattcttgtgcgaggctcttatcttgatttcttcaccgggaaaaaccgttgcagccgcagtcacattcagagacggcgacaggatgtcttcgcgaagattcttcaacgcatttattctacgataaccgggatataaacggatcgcctcatcacaaagttgcaaagcaacggtttgctgttctttcccaatcatataattggcctgagccaaataaacttcagcacaaagatctgatgacttatactcggttttcagtgcatccaagcctgtttcataaggatcaaccgtcatcatataagtaccgcctttcttcacactgaaaggctcacgaaaactcttcgaactatcacgcttccaactcagataattcaaattcgtcagcaaacatccctccttatcccctttggctttataagaggtgagcatattttcatatatacgttcaatatcctgttttaccggagattgctttttagaggaagtatcctccgaataagcttctaccggagtggcacgatccagtccttctatctgctgcaatgcctcaatgctgcggaaagccagcaaatgatacatatcatgatgataatattcactggtttcgcccagttccacaaaaggaatataagtgcgtgaagaagtattgagtaatagcacggagtctgccatcgcttctttaatgcttgttctgactttttctacaaacatatttgctgtccactcccgcatatctgccgaaggagcttcgcctacaatctctgtccgctgccggagttgccattggttattagcggcgtaattcgcataaattcctgcaatcaatgaatgcaatatagcccggtccatcggtttatctgccagctttgcccattgttccaactcttttacgtttgtataaaggctgtcaggagtcagcatatcccgatacttcattcgccacatatacgctttcagcatttgcggggagttcttttccgcctctcctttctgataaatctctcctgtcagctttatcactgtctgaggcagactcttcttttccgcctgctccacttgtttccataatttgtcgaacgtctgagcctgcaccgccggaatcactcccaaccataacagtaccagcatacaaatctgctttattttcataatctttccagtttaagtttgatatatcctctttgtataaataacaaagtaaagaaataaagtttaaagatttattctttttcaattaaaattcaataattgacttatctcatctaatgccaaatttgaagaagagaagacgcaataagacgaaacacaacgaatgtgccaacattttaccaactattttgggagaagaacttattatcaaagaactataaacaaaaaaacgtgaagactgagttgcttggcccatctcatgcaattagttcgtagtaatgttcgatttttaagattatatcaagaaatcagttgatcaaaaaatagtgagccagcaaataaatcgcataaataagtgcaataatatgcagaaatataggccaaaaccacataaaggtacgcaaaacatacatcttttcttactgacaaagccttcgttggtttaaaaccaaaggaccgttggttttaaaccaacgactatttcctcaccgaggaacttgcttatcaccggcgaaaaagtaataaaagaggtatcgggaagctatttttctctagtttatcaacaacagcaaacatgacaacaataacataatgaatcatcaaaattcaataaagttaccaaataatcagtttaagatcaaaattacttcagtttaatcgcaaaactatccaattcatacaaggagtaaatatcaaagttacaaatgccggaactttttcattctatatttatatgatgttgtaattagcgtcttcctgactgtttaaatattctttttttaaggaagacccttttttcaccataagaccgatatatacacaaatagaaataaaacaggtgaggagctaaaagaacgcatcgtaatatgggaagatacaaagagtatattatgtgaaaagaaatacaaaaataacaatggaagaagacaacaatatactttttgatctttgattttcccctatttagttctatctttgtctatgtttcatataaaaacgtaatttagatggacgagagattcagacgatacccgataggaatacagaatttcgaagatttgcgaaataatggttatgtgtacgttgataaaacggagttaatttaccgtttgacaaacacaaataaggtttattttttaagccgtccccgacgattcgggaaaagtctgctagtatctacactcgaagcttatttttccggaaagaaagacttgttcaacggattggcaatggaaactctggaaaaagaatgggctgtttatccggtgctacatattgatttcagtgtgagtaaatatatgactgccgaagcgttatcagccgtcattaattaccagttactgcaatgggaaaaattatatggacgcgaagaaggagaaacgactttcagccttcgtttaaagggaatcatacaacgcgcatatacacagaccggcaaaccggttgtgatacttgtagatgaatatgatgctcccatgctggacagtaataacaatacggaattgcaaatagaaattcgtgatattatgcgcgatttcttcagccctttgaaagcgcaaggccaatatatccgtttcctttttatcacaggtatcagcaaattcagtcaaatgagtatctttagcgaactgaacaacttgcaaaatatcagtatgtgggatgaatatagcgctatatgcggcattaccgaacaagaggtacacacactgcaaatcgatattgaacagatggctcaagccaataacgaaacatatgaagaagcttgtactcatctgaaacaacaatatgacggatatcattttagtaagaatagcaaagacatttataatccgtttagtttattcaacgcatttgcccaaaaaagttatgagaatttttggttttctaccggtactcccacttttttgatagatctcctgcaagaaagtaactttgatatccgtgagttggatgacactactgctacagcagaacaatttgatgctcccactaatagaattaccgaccctcttccagtactttatcaaagcggctatctcactattaaaggatatgacccgagttttcagctctatacactagcttaccccaacaaagaggtcaggaaaggatttctcgaatctcttatgcctgcttatgtgcatttacccgcacgagagaatacattttatattatatcatttattaaagacttacgtgccggaaatttggatgaatgtttggaaagactgaagtccttcttcgcttctatccctaataagttaaataataaggaagagaaacattaccaaaccatcttctatctatttttcaggctgatgggacaatatatagatgtggaagtagatacagctatcggaagggctgacgccattgtaaaattacaagataccctttatgtctttgaatttaaagtggacggtacaccggaagaagcattggcgcagattaatagcaagggatattccattccctatcaggtgggagactggaaaataataaaagtgggggtaaactttgatagtgcgacgagaactataggcacatggaaaacagaaagataaagaacgcggattagccactatacaacctaaatgacagaataaaaagtggggataacgttttcaataacgcatccccactcaagcttagttaatgtactgaatctcatttttcaattctgtacccccatgaaagcatttcgttgcgacctacttcactgaggatttttctaattaatgaactcattttctttgccataatctttaaacctttaaaattactaatacctgaaaactaaaaaacttaaatcttctctttggggagtatgccaagtgttgagtatccccaaacatgcacatcggcattgccgatctttctaaacaatctttctaactttttcattttgttatcctcctagttatatgttttacaacacaaaaatagagcctttgtttataggttataccgaaaaaggagggaaatctatgttttatagcatattaattgatttgcatcaattaatttatttgccatgaagcagaattgtaatatcaatggcagtaaataatcgagtaggaggaaaacgaagtagaagttttcctcctactttcgttttccgacctctcacaccaccgtacgtgccgttcggcatacggcggttctcttaactgcgatgcaattgggtataaagaattatcattgacggataacccgccattacaagcttatctgttgtgattgctctatgcaatatccaactatccgcaatgcgccaatagcctttacgggtattcgcccattcccaagatttccgacgagggatgccacacttctgcaagctggcaaaacgtgtacgtacccgcttccaactcttccatatatacattctaagacgacgattgtaccacttcgctgttttgattataaaatctttcatatcggcataacgatagtatgtcagccaacctcggatgtattgcgtcaggtggagtttcagccaagcgtagccttgaccactactacggctggtcaggtgcttgatggtgcgtttgaacttggattgacttttcttatgaagattaagaccacatttacggtcggctcttcagtagaaggagtgtccaagatacttcttgccgcagatggaaccgacttctgtcttctctttgtttactttcaagaataacttcttttctataaactcggaaatactatcacggactcgctccgttgcccgaagactatggacaaggatcagacaatcatcggcatagcggacaaacgggtgccccctgcgttccaattcctggtccaactcattaagaagaatattgctcaatataggactcaatggaccaccttgggggacgccctcggcagtctccgcgtatttgtgagatactacaactcctgcattaaggtatttgtgtatcaaagatattacactgccgtccttgacggttcgggataagacctctatcagtttgctgtggttaacacggtcaaagaacttttccaaatccaaaccgatacagtagcgataaccttggtctgcatattcctgcaccttatgcagtgcatcgtgagcactacgatgagggcggaagccgaagctgttgtcactgaactgaggttcgtaaagcggtatcaacacttggctgattgcctgctgaacaaagcggtctaccactgtcgggatacctaatgggcgagttttaccgttgtctttcggaatttctaacctgcgcacaggggacggacgatacttccccctgcgtatcttttccaacaattcgtctttatggagggtaaggtatggcaacagttcgctcgtctccatcttatcgacacctcccactcctccattccttacgacttggcggtatgccgcattcaagttcgatggacttagaaggagttccaacagattgttttcttccaattgcacttccacaagctgctcatcttttatctccataaaagtctgcactcccacatactcgtcggatgctgtcctatccatttgtgggcagttcgttttactgattttccgcattgactctttcataaagtattaaatggtacttgtttgattaaaagttcagtccttcaccgactgccgatttttttaccttgtcggttactatgacctctgctgacttctcacggttcgttattactgcttgactgtatttatttatttttcctcgcccgtgagacctccccagttatggacatattctttccatcttatgtctgcttgatttactttggatgttccggacaactataggacttcgttttgtttagcaaacttatccacatccttaagccttaatatcaagtttctgtacgtcagaccagatatttgccgcaggcttccttcagattccacctcacgatggacacccttgccgttggctatatacttcccgttgtcagggcgctttagggacttacacccgttagaatatgttcgtgctgggcgaactgacaaaaaggcacggaagatgtcttccgtgcctttttactgtattatacctatatataataggaaaagaaatcttatttcgtcggagtctgtgctaaggtagccaccaggaagtcatagaacttctgtacggtaggaatcaaagctctttcatccggtgagtgcggcgaacgcaatgtcggaccaaacgaaatcatatccagccccggaatgatagcaccgataataccgcattccaaacctgcatggattactttcacagcgggttctactccaaactgctgtttataagattccttcatcgcatgcaaaataggtgattcaacgttcggctgccatcctgaataaccgccagtcatttccaccttcatacctgccatagagaagcaagactcaagactggtagtcagatactctttcatactatcgctggagctacgggccagaatcttaatttcagccttaccgccgccaatcgtaataatagccagattagaagatgtttccacggtatcaggaacggtcggaatcatacgagtcacaccattctgacaagcaaaaatggcatcaatcagattatcctgaatttcttcgggcacttcaccggcaggcagttccacacgttctgccgtaaagctgatcggagtttcgattgcagagaactcttcattgaacaagtcttcgcaatatttcaccaatcccagcagttcctcttcgttttcagcaggaatggcaagtaccgcacacgcttcacgaggaatcgcattgcgcatattaccaccgtcccagcttaccaggcgggcttcatagctggcaaccgcttcacgcacgaaacgtaccaacagtttattggcattggcgcgtccttcattgatttccaatccggagtgtccgccacgcaaacctttcaggcttactttaacagcgacgtcgccttcttcgggagctatttccttatattccagcgtagcagttacatccataccgccagcacaaccgatatacagttcgccttcgtcctcagagtcaagattcagcaggatttctccgtttaccgtacccggtttcaagccgaatgcaccgtacattccggtttcttcatctttagtgatcaatgcttccagcggaccgtgtttcagatcattcgcttccagtacagccatgatagcagctacacccagtccgttatcagcacccagcgtagtacctttagcttttacccagtcaccgtctatataagtttcgataggatctttttcaaaatcatgaaccgtatcattattcttctgaggaaccatatccatgtgtgcctgaagaattacacctttccggttttccatgcccggagttgccggtttacggataatcacattacccgcttcgtctacgaaagattccagtcccaagccttttccgaaatttatcagaaattcagtcactttctccatgtgtccggacggacggggaatctgagtcaacgaataaaaatgcttccacacattctgtggagctaaagaaagaatagtactcataacaaatctatttttattaagtgattactttcgctgtctattggtaaacggcaaagccgccaaaccatatacacccaacaaaactaccaaaaaagtttgaataccgtgcacaattagagcaaatattccggcatccgtcacatttactccgtaaagcatcatcatctccatgatagcaaaatgccacggtcccgccccgttgggagtcggcacaataacagcaaacgtaccacctacaaacattaccagcgccgcaaggatgcccaaatgagcagtaaatgcaaagcaatagaacgtaaaatagaaatgaaaaaaataacaagcccaaatggccaatgtataaaatataaacaaaggaatattgcgtactcctttcaaagacatgattccttcccaaatattcagcacaaagcctttcacccgttcatagaaaaacagcgtcttccttaaataataaagaagtaccaccaccccgataaaacaaaacaagacgatataaaaccataccgaagtcaagagataggcaaaagaaggtatcttggttcctgtattttcgaggaaagtgacaaacacaggcatttgcagcaatacggtaataccggtaatcagaagaatggtcaatgtatctaccagccgctccgtcaccactgtccccagcgatttggcaaacgagacattatcgtacttcgctaacactccgcaacggctcacctctcctatccggggaacgaccagactggcggcataagaaataaagatggcattcacacagtcgcttctttttgggaaagcatccagcggctccagcgtctgccgccaccgccacccgcgaaatacttgagcaagcaccccaaacaagagcgaaaagagcatccaccaccagtttgtgccatgccgtaatacctcgccgactctgctgaaatcaaagtcgcgataaacccaatatagaataaagccgcctaaaacaatcggtaatatcagcttcagcgtcttttttagtagtttcttcatccttaattcttcattcttcatttaaaagaattacctttgtcggctgcaaaagtaattatttagttggtaaatgaaattagtaaagcctaaaaagtttctcggacagcactttctgaaagatctgaaagtagcgcaggatattgccgatacagtcgacaccttccccgaactgcctatattggaggtaggaccgggtatgggagtattgactcagtttctggtaaaaaaagaccggttggtaaaagtcgttgaagtggactatgaatcggttgcctatctccgtgaagcctatccgtcactggaagatcacattatcgaagacgattttctgaaaatgaaccttcaccggttgttcgacggaaagcctttcgtactgaccggtaattacccgtacaacatctccagccagatatttttcaagatgctggaaaacaaagacatcatcccctgctgtaccggaatgatacagaaagaagtagccgaacgtatcgccgccggaccgggcagcaaaacctacggcatcctgagtgtactgatacaggcatggtataaagtagaatatctctttaccgtcagcgaatatgttttcaacccgcctcccaaagtgaaaagcgccgtcatccgcatgacccgcaatgataccaaggaactgggatgcgacgaaaaactgttcaaacaagtggtgaagaccaccttcaaccaacggcgtaagacattgcgcaactctatcaaaccgattttaggcaaagactgcccgctgacagaggatgcattattcaacaagcgcccggaacagctgtcggtagaagaattcatcagtctgaccaaccaggtggaagaagcgctgaaaacagccaccccacccggtaactgacagacagtgagcgaaaccagtaatttgtagaacgtttaatcgcaaacaaaaagatgaacgaggaatacattgacaacgtaaaacaccttatcgagcagaaagatgccgataaggtaaaagaacttcttgtcgaccttcaccccgccgacatcgctgaactgtgtgatgacctgaacccggaagaagcccggtttgtctaccgcctgctcaacaatgaaactgcggccgacgtacttgtcgaaatggatgaggacgttcgtaaagagttcctcgaaatgatcccttcggaaacaatcgccaagcgctttgtggactacatggacacggatgatgccgtagacctgatgcgtgacctcgacgaagacaagcaggaagaaattctttcgcacatcgaagacatcgaacaggcaggagacatcgtggacctcttgaaatacgacgaaaacaccgccggtggtctgatgggcaccgaaatggtagtcgtgaacgagaactggagtatgcccgagtgtctgaaggaaatgcgccagcaagccgaagaactggacgaaatatattatgtatatgtcatcgacgacgatgaacgtttgagaggaatcttcccgctcaaaaagatgatcacctctccttctgtctccaaagtgaaacacgtgatgcagaaagacccgatctcggtacacgtagacacttccatcgacgaagtggcgcaaaccatcgaaaagtatgaccttgttgccatccctgtggtggacagtatcggccgactgataggacaaatcaccgtcgacgacgtcatggatgaagttcgtgaacagtcggaacgtgattaccagttggcatccggtctttcgcaggacgtagaaaccgacgacaacgtactaagacagaccacagcccgactgccgtggctgctgatcggcatgatcggaggaatcggaaactccatgatattgggaaatttcgacgcaaccttcgccgcccaccccgaaatggcattatatatcccgctgatcggcggtacaggaggaaacgtcggtacacagtcttccgccatcatcgtacaagggcttgccaacagttcgctggatgccaaaaacaccttcaagcaagtgaccaaggaagcggtagtagccttaatcaatgctaccatcatctccctgctggtatatacctataactttatccggttcggtgcgacggcgacggttacttattccgtatccatcagcctgtttgccgtagtgatgttcgcctccatcttcggcacgctggtcccgatgacactggagaaactaaaaatagatcccgccatcgcaacaggtccgtttatagccatcacaaatgacataatcggcatgatgctgtacatgggaattactgttttattatcataaaaacacgataatcaaaaaaaaataagcaaaagagtatgaagtaatcgttttatttcattattttgtgacccaaaactaatatacaatgatggacgctcatgacactaatcttcccttgaaccaaggggagttagaagaagaaaagaaaacagttgaggtttctgaagccattacagagactccgactgaagaaggtaccgaaaaagttactgaagaagttactgccgaagttcagactgaagcagcacctaaacctgccacaaaggaagacgtactgaaccgattgaaagagcttgcgcaagactcggaaaacgcaaacaagcaggaaattgacaatctaaaacaatcattctacaagttacacaacgccgagttggaggctgctaaaaagcaatttatcgacaacggaggcgctgccgaagacttcactccgcaggatgacccgacagaagaggaattcaaacgcctcatgggatcgatcaaagagaaaagaagtcaacttgttgccgaacaggaacgtcagaaagaagaaaatctgcaagtcaagctttccattatcgaagaacttaaagaactggtagaatcgggtgatgatgccaataaatcttatacggagttcaaaaagctgcaacagcaatggaacgaaaccaaactggttccgcaaggcaaggtgaatgaactttggaagaattaccaactgtacgtagagaaattctacgatctgctgaaactgaacaacgaatttcgtgaatacgacttcaagaagaatctggagatcaagactcatctttgcgaagcagccgaaaagcttgctgacgaagaagatgtagtttccgctttccaccaacttcagaaactgcatcaggaatttcgtgatacgggtccggtagctaaagaactgcgtgacgaaatctggaaccgcttcaaagctgcttctacggctgtaaaccgtcgtcaccagcaacatttcgaagcgctgaaagaatcggaacagcacaatctggatcaaaaaactgtcatttgcgaaattgtagaagcaatcgagtatgatgaactgaaaacattctcggcttgggaaaacaagacacaggaagtgattgctctacaaaacaaatggaagacaatcggattcgctccccaaaagatgaacgtgaagatattcgaacgcttccgtcatgcctgcgatgacttcttcaaaaagaaaggagaattcttcaaggctctgaaagagggaatgaacgagaatttggaaaagaagaaagcactttgcgaaaaagcagaagcactgaaggacagcactgactggaaagcaaccgctgatgcactgaccaaattgcagaaagagtggaaaacaatcggtccggtagccaagaaatactcggatgccgtatggaaacgtttcatcactgcttgtgactatttcttcgaccagaaaaacaaggctacttcttcacaacgttctgtagaagtagagaacatggagaaaaagaaagcgttgattgaaaaattagcttcaatcgatgaaaacatggatactgacgaagccagcactttggtacgcgaactgatgaaggaatggaattccatcggtcatgttccgttcaaggagaaagataaattgtataagcaatatcatggcttgatcgatcaactgtttgatcgtttcaacatcagtgcatccaacaagaaattaagcaatttccgttcaaacatcagcaatatccaaggaggaggttctcagtctttatatagagaacgggaaaaactggtacgtatttatgagaatatgaagaatgaacttcagacttatgaaaataacctgggattccttacttcttcttccaagaaaggtagcagcctgctgacagaactgaatcgaaaagtggataaactgaaagctgaccttgaactggtattacagaaaatcaaggttatcgacgaatcattgaaagcggaagaataaatttttccgaaacaaaggataaaatcctctcatataaaagccaactaacccattacggatttagttggcttttttattgaagctttcattatattctcactgcactaagaaaaaatactcatgcctttgagaaaattttctcattgcattgagaattttttctcagtgtggtgagaattttttctcaaaggcatgagaactctttgagaatatagcaacctttatcacgctgtgtactatccaaatagcaactaaatattttctcccttacacccgtaattaaacgactgccaaaatgctttatatttaaaaagtgagtttttcgcccgtctgaccgaagcattcaaccaattaaaaggaatagaggaacaattcaactaagttctggtagaacttagcataaaaaacagtctgttaatccgctcgtatctacattaacgtatctaactaagcaatagatctaccatcttttttgctaaaaatcaacgattcgtgcgcaaatatactaattagttcgaaaaagccatactatttagcaataatatttcagattaaaattacaaataagtttcttactaattctcatttaatcaatcaacgggtagaaactgagtcgtaatttccttattacgcctttacaaagcccaacattatccattgaatatcaacaatatatatttcattctctcttatcatctactatattatagttctaccagaactaagacatagaacctattatttttttgactttaaatcagcatagttcagcacgcaaataaaagttttaacttctaattttaatgcctatgagaaagaaataagtattccaaatccaagagtacccacaagtacttcaacttgcttttaccctttttacctttaataaaactaatattaatttatgaaaaaatgctttgaattaacaccatgcctgctggcattcttatgcattaccagctgcgtagaagatgttgaaaacgaacgttctaagggaatgttctcagcatcacaaagtggattctccaccattgaagtttacgatttaggccctctcaacaagattgatttatccattgccaaggcaggattagaagatgccggaggaacagttactttttcagtagaacaatccttgttggattctctgaataatgcggacggtacttcctatcaattactacctcccgaatgctatacaattgaaaatgcaacctattccgtctctcctggcggagacaggcgcgtaacaggaggcagtctggtgtatgatccccacaaaatctacaacctgtgcggctttgatgaacttaaatacgttcttccattacgggtatcctctacagggactcctatgaactccgaccggacggcagcgctttacggatttattgttaaagaagctattgtcagactcgcatctaccggaggagacttcgtcattgaaggaggaacgactacttcacctatgaatctcgacacagagataagctttgagaacgaatgggatctgaccacctcgtttgcagccaaaggagcggactatgtggataactacaattcggcaaattcgacctattacatacctttaccttccgacttctacactcttcccgatgtcactatcgccaagggaaagacaacgggaggctctgctattagcctgctgggtgaaacacttccccccggaaattatcttcttccggtttcactcagtggacttagcggccaaggagatgccagcatcaacatagacaaggaaacggtagccaactatttcgtaatcaaacaaggtggccctattaaccgtgaccactggacagtgactgccaacacggaagaaaagacaggcgaagtttcagccgcttacccccacaacggtcagacgatatctttgattgacggagagataaacactttctggcatagtaaatggcagggaggcgaagtagctccaccatatgaaataatactcgacatgggcaaagaaaacagtgtcagccaattaggactcatcgccagacaaaatgcacttacttctatgaatcttgagatttatgcaggagatgacggtgaaacatggaacctgattggaaaatacttctttgacggtagcataaaaacagagcaaatggtccccgtaaaagcatgtgacgcacgctggatacgtctttacatccccactctgggcagtggttcgtctgtaggacatctggcagaaatatatgtatacggcacggacaagtaaccttaattattttctaattcttacttaaaagaaacatttatgaataagacattaaaagtaatgtgtttcattctgtttgccttatttgcaggaataaacacaatttatgcacaaggacaaagtccaacaggactcgtagtcgatgaaaacgggcaaccgatgatcggagtgcagataaaaatcgaaggaaccacagtcggcgccatcactgacgtagatggtaatttcaccatcaaagcccaaaaaggcaatatacttcttttctcttatgtgggttacgaacagcaaaaaatcacttataaaggagaaaaggtattagcaatcaaaatgcttccgagcacagagatgctggaggacgtggttgttatcggctacggaaaacaaaagaagaacagcgtagtgagttccatcaacgccatcggccccaaagagttgtccgtttcttccagccgtaatatgaccaataatctggcagggcaagtaccgggattgatcgcagtacaacgttccggagaaccgggatacgacaatgccgacttttggattcggggacaaagttctttcaaaggaggtaccaatccgcttgtattagtcgacggtgtcccccggcaaatgcaggatattgaagcagatgaaattgaatcatttaccttactgaaagatgctgccgccacggccgtttacggagccgaaggcgcaaacggagttatcttgattacttccaaacgaggaaattcacagaaacctaaaatctctttccgagctgaaggaactattctcgagccaacacgcctgccgactttcatgaactcagtagaaacgttgaacctatacaacgaagcattgaacaacgaaggaaccgccagcatacgcacagacgaagagatagccaaatacggtcccggagccgaccgtgatttatatccagacaccgactggttgggtaccatgttaagaaaccatacctacaatatgcggtataccctgaacgtgagaggaggaactgaacgtgcccgttacttcgtatccggcgccttctatcaggaaaatggtatattcaaggatttcggcaatgactatgataacaatatcggattgaagcgctacaatctgcgcagcaacattgactttgacgcaactaaaaccacaacagtaaaagtagacctcagcggacaatatctgcaaaccaactatccgggaacaggaaccagcactatttttactaccatgtgccgtactccgtcttatatcatgccggcagtttattccgacgggactgtggccggacatccccgtccgtcaggcaaccgttctaacccgtacaaccagcttgttaactcaggatacgccaaagaatggagaacttccatccagtcgaaagtggaagtagaccagaagctggacttcctgaccaagggattgacatggaaaggacttatcagctttgacgcagacatgtcatatatcgccaaacgtaccaaaacaccgacacaatatctggccacaggacgcgacgaaaatggcaagctgttatataagactgtagtagaaggcagcgatgtactatcagaaaacctgagtaacagttcaaacaaaaagatttactttgaaacagccttcaattacaaccgtacatttgcagagaaacacgatgtaggggccatgttcctatacatgcaaaaagaaacacagtatcacaataacgctttaccttatagaaagcaaggtttggtaggtcgtgtaacttatggatatgacggacgctatttcttagaaggtaacttcggctacaccggttcggaaacctttgcaaaaggctatcgcttcggtttcttccccgccatgggtttggcatggtatatcagcaatgaacattattatccggaagccttgaaaaaggtagtaagcaaattgaaattaagattctccatcggtcgtaccggtaacgacgataccggcggcaaccgcttcttatatcgtggaaccatgaaacaggataatagcggctataatatcggattcagcaacagcggcgcattaggcggagtaggcaatggaattaccgaagcccagttcgaatcaccgtttctttcctgggaaatcgaagacaaacgcaacttcggtatcgacttggggttattcgacaaccgcattgacctgcaagtggactacttcaacaacaaacgtaaggacatcctattgcaacgtaataccgtttccaatgtgacaggcttccagcaaatgccatggcaaaacttcggtatcgtaaaaaaccaaggtgtggatgcaagtctgaatctcaattataaagtaggtgaagttaacctgagcgcacgcggtaactttacatttgcacgcaacgaaatcctcgaatatgatcaggtgccacaagtttatccgtggctcgaaaagaaagggacacgactcaactcatggaaactatacattgctgacggactttataccgccgacgacttcaacataacaggtgaaggtctgaaccgccagtatgaactgaaaccgggagttgtatccggtctgtcaagcggagtacgtccgggagatatcaaatacaaagacctgaacggagacggtaagatcgacagcaacgaccagatggaagatgtaggaaatccttctgttccggaaatagtttatggcttcggcctcaatgccaaatggaaaggagcctatgtcggtatcttcttccaaggttcaggaaatacatcgaccgtattaggagccagctcgaacggagcatttttcccgttccaatggggagtcgaagagtctgccgtacgatcagaagtagccaacagatggacggaacagaacccaagccaaaatgtaatgttcccccgcatgcactctaccaattatgacaacaatacagctgccagcacttggtggctgcgcaatgccagtttcctgcgactgaaaaatattgaagtcggttacaacttcaaggagaaaacactgaaaaaaatcggtatacaagctttgcgtgtttatctgcaaggaaacaatctttgtgtatgggatgatatcaaaatgtgggacccggaacttggaaacaccaacggcggcttctcatatccactgagccggactttcacattcggtcttgactttactttctaataatacatataatacattatatatatgaagacattgaaaaaactatcaatcatagtagccgtaggactaagcacggtattcttttcgggttgcagcgattatctggatgtatcggacgacctggcggcagaattaagcatggaagaagtattcaataataccggttatgcccgtcgcttccaccgatatatatattccggaattccggatgtatcaaacattattataaccagcgcttatgcaggtttgacaggattagataatccttggccggcagtttccgacgagttaaaaagtgcacaaaataatgtcaagacaattccgacagtaggttaccatgccggatcggcggatttatcgcgctggagtctttacaaacaaatccgtcaggcaaacgaatttctggcatactcgcatacgatcccacagcaaggcgacgtgacggattacattgacgaaaacgaattggcaagattgaaaaacgaagcccgtttcctacgtgcttactatcactacttgttattcgaattgtatggccctatccccattatgacagaaatatcggaaccgtccgcaagtgatctggactattaccggaactctgtcgacgaagtagtgcaattcatcgattccgaactcaatgaatgctacaatgagctgcctgaaaaggaagtgaatgatgacgggactccaaacgagaaccgaagcgcagcacctaccaaaggggcagcattggctattctggcaaaactccacgtgtatgccgcaagccccttacttaacggaggatattcggaagcaatcgcattgagggataatcaggacaaacaactgtttcctgcgaaagatgacaaaaaatggcaaactgccttaaacgcgttgcagcgcttcattgattatgcaaaaactcactatcacctttataaagaaaaagataaagatggagagttgaatgcagaagaatctctataccaactctttcaggtaagtttgaacaacccggaagctatctggcaaaccagcaagaattcatggggcgatgtaggtggagaaggaagagaacgcagatgcactccacgtgccatatatagcggattcggttgtgtaggtgtattgcaggaagctattgacgatttcttcatgaatgacggcaagagtattcacgagtcaggactttattcagaagaaggcattggtgaagatggcattcctaatatgtataagaatcgagaaccacgtttttatcaggacataacttactccggcaagacatggcaaaaaacaacgaaacagatttatttctataaaggcagcggagacgataactccaaagcggatatgagctactccggctatctgctttataaaggaatgaaccgtgatcttttaaaccaaggaagcaatgccaagtcaaagtacagggcaggaatgctgttccgtctcgccgacttctatttactatatgccgaggcattgaatcatgtaaacccttcagatgagcgtatcattgcacacatcgacagcgtccgctacagagcaggtatccctttattgaaggacatcaagcctgaaataaaaggcaatcaaactttgcaggaagaagccatacgcaaagaacgccggatcgaactatttgccgaagggcaacgctatttcgacgtccgtcgctggatgtgtgccgatgaagaaggatataagcaaggcggaccagtacatggcatgaatatgaacgctgataacctggaggactttatggagcgtaccgcatttgaaacccgtatttttgaaagacgcatgtacctctatcctatcccgttaaacgagattcagaagtcgagcaaacttgttcagaatccgggatggtaacagccaaacgtcacaacacagacacaataggtatcccatcatagatgcaaaaaacatcacctaaacggtgctaatgtaaaaagagttttccattcattttggaagactcttttttttgagccttaccagctataaaagtataccgcaaaaaacaaaaatcccgctaaaactttcattttagcgggattttcgtattcatcattgacgttgatcttgttgggctacctgccctcaaactttaatttctttataatctcattttcaatgaaataacagctttcatttttagcagtgtcaccgaattagacacctactttggcaaaaaccctcttttaatatccaattgaggattcaagttttctcttacaaaggtattgtttttaatcggataaacctaattaaagtgacaaaaagagacaaatctcgcatttaatttattaactttgaagcgtaaaaatataaaagatgcaaaaaaaacacagtcaatctgaaacttatgtacatgggtattttcacaatgtaaaaggtaatctgctattgggaattatcattgtacttgcaatggttatcatccagttattaagcgggtgcgatcaaccggaaattacaggagagacaactgataaacaaattttagaaactgacagtctgaatgatgaagtaaatgaatgggagaacgacactaccacttatcactcagaagcaaagccatactaaatttatttctagtttccaatcataaattcaacttataagttgaatttatgattcttttttcgtatctttgtgtcaacaaatcaaagaaatgaatatgatattcaatgatattactggagatggaaggctgtgggctgtacgttttgaaggcgagcaaaacaatgagtttataaagttgttctataattggagagatgcaatgtggctacgtactttctttaaagaaaatatgaatgacctcagttcgtacttccacataaccgatatcaggcaggcaatagacgatacgattgacgacagcagacgacttcgttgtattatgctggatatctctccggaagcggatttagaccgcattttcagaccattggacaataatcagatggcggaaatgatgctcgaaaaagaaaaggccagactaaaacagagaattggacatgcgtcatggctccgcatttacgctatcagattgagcgatggagtgtatatcattactggaggagcgattaaactgactgccacaatgcaggaaagggagcataccagaatggaactcgtgaaaatggacagagtgagacgtttcctgctagaggagaatattattgatgatgatggatttgttgattatatgagtgaattagaataaggaggaacaatatgaaaacagtggttgaaaaacttagagaacattccgaaccggatacatcgaactggagggaagtgtttaaagagatgaatgccaatgatatttggctgaaacattcgcagcatatagccctaattatgcttgataaaatggatgaactgaaaatgacacagaagcaactcgccgagcggatgagctgcagtcaccaatatgtgtcgaaggtcctgaaagggcaggaaaacctttcgcttgaaacactggcgaaaattgaaagagcattaggcatatctatttttaaagaagagcctttagcagtatagacttgctagcagattatttgttccggaacaaaccgggcactgtgatctgctagcataacgagtgagatatcgggatgatcaggtgcagatcctgccaggtatgtgatagcagacgaaggtaatgaccaagcgtctaaccaagcggaattacttttgcgtgcggcagttcgtctgattgctccccgcagcgcagccgcatcagggcgccgccttacaggactgcacccccatgcgcccgccctgctccgtcagtgtttccaccggaaccttcctgtcaccgtcagcgtttatcggaaaacttaatgttttgctcaccgtgccgcttggcgggatgaagcgcggctgacagccgcacaatcacccaccaagccgccctcctgcagtgatttttaaagaacattcctggaggaagtctcttgaaagttactccagtgtataacagtcgaggcttgcaaagtgggtgattacggaagttacttccgtctggcgcattcggctccggctcccgctcacaccccggcaagccggaccacaagcgacagcctatgcggtggtagcccatgcggtatgtactcagtcgttttcaatacccggtgcggtttcgctctgcccggcacttgctgccgggacaaggctcaatccgctaccttctttcgtctgaacgacaggaaacaggctgctagtctgaagtgcagccatgcggtgcgaggttcccgtgtttatgattgatcattcctgggcgattagaccatgaaggcggcgcaagcgtccgccgccgtgctgacgtgatgcctgcgtgcgctatgggtagcagtggtttgcagagaaatagttgaattgggcgagatgcagaaggaacattatatttaatatcctccggcgcgttccgcccgtgaggaatattcaacataatgtggccttctgcacgtcgccccggaaagacagtgtttggcataaccgggcagaaagttaccccttccggatgtttccctgcggaatgtttacgcctccactatggcggcaagccgccaccccgaccaccgccccgaagttactcccgtttttcgctcctcctgcggattgcgcctgcggcgttcccggcagaccgcttccgccctgcggcgtgccggaaatcttcggcgatcggcttcgccgtccgctccggggagcggggcgaaacgccccgccgaaaagtaacgaacaggggaaatccgtgacaatcgggcgaatatcactaaaaagtatagaaggaataaatcacataacgaacacatgaatgaccccgtagcgcagccgctcccacggctacagcccacccccttcggtgggggaacgccctgcggcaaggggggcgaccacgcccaccgactaagcgcctcccccaaagggggacgggagggggtagaacaaaaatacctctttataaatttatatataacagcgtttctattcctcttcctgcgtttatttatggatagaagaacacccaatcagaaagaaaacagtcagctatatgcctgaaattgcgaaaaacatctccaagaaaacaacaagagttttctaaaaaacgtcagacattttttgaaaaactcctgatatattccgcaagccctgcagacagtctctaacagctgaaaacgaagaaagcccgatgaactttttctgttcatcaggctttcttttcaaatggttactgatacgcagcggatgaccgctttaaactgtcgggtctggtgcttcttcgtctccgcccccggggttgtcgatatcccctccaccgggcttttcggtattcccgccttcggcagtcgcgccaaccttagagaaagcatacattgctaccgcttccttgatttctgcagaaggtacgtagatcacgcgggctttcttcacgttacttgccgtaaacttatccacattttcgctaccgatacccgatacggaaggacggaatgagccaaggtcgcctaagcgaataggagaaccgttggcaaggttacgtttgataactgtcatcaatgcgtccagcaccgctttcacgtctgagccagttacggtacaacggtcagcgatctggtcgatgatttgtctctgtgtcatttccggagcaagaactacctgagcgtagtattttccggctgcttttttgtcctgcggattcttacgcaaggatgcttttacttgaattgccatgtttattagtgtttagtgattaatgattcattctgcgggcaaagttatatatacgcgcgggcggctgcgggcgtgcattcttatctatgatgatatgtgatgcatgatgcgtttatgtacatgaaaaaagggctgcggggtatgtccgcagccctcaaaacaggggttttcccattgccgggtattacaggagttagtccttcttctcgttatcgttgaccgggctgtccgctccggtcagccaaacgaaaattttaccgatcactttcaatactcgcaacgtgtttctccaaaatggtttcatattgacctcctttttaattgttcccggcaaaggtagggtgaatggataatggataatgagcaatgaataattggctacgctttcatgcgcttatataccgcatggtacattatccattctccattttccattttccattaaataaccgtattcggtccggacattgaagcagggacattctttgatgtactcgcatggttctatgatcccgttatggttgagatcgggactcagatcacgatggccgcagacctttgctcccggataggtgagtaacagaaagcgcaggagcgtttcaaggctttgtttctgtgcggtggtacgtgtgtcggttgctttgcctgatgcgttaagacctccttcgtaagcgattcctattgattcgctgttgtggcctttggcgtgtgcgccgatcttggtaatgtcgcgcatgtggtgtatccggccgtcttttgtgatgtaataatgatagccgcattcggtgaagccttgccgcttgtgcatggcgtcgagggcggacggggtgagatcactggtgcagcgggaggcggtgcaatgcaccacaatgagagagatgtttctttgtttgatcattgttttgtgggtgattatgtgagtaatttctagttgtgtatttctcatctacccccctcccgtccccctttgggggaggcgctcagtcggtgggcgtggtcgccccccttgccgcagggcgttcccccaccaaagaggtgtcgggctgtagccgtgggagtggctgcgctatggggtcagaagggtgaaccgaaagtggtcgtaataaggtctctctgtttaggggtgagaatacggttgctgaggtggtagttggtttcttccagtgatcccaatagttctacgtcatcctttatccactgtttaaggcggatactcgcagaggcaggggctatattggggaagtaaagtacggccagctctttaaagccataacttcggttactcaggttggcttgatagttgttttgtgagtgtacgtttgtatacatggttcggaatattggtttacagtcgtaaaggtagggcttttaatgtgtagttgtcatccggaaactgagtagatatagttatatatgcttgttaaaggctggaagttgtgacaatggcgcaaatgtcacaactttcggcggtcggcttcgccgtccgctccgcggagcggggcggcacgccccgccgggaaacttcggtatgccgcagggtggaaacagtcagccgggcacgccgacaggcgcagtccgaaggaggaacggaaagacgggagtaacttcggggcggtggtcggggacagccgccgtcccatgtgagaagctacggggcggctgtgtggaggcggtaatattccgcaaggggtaactttgagcccggtaccgagaaacgggaaactacccaaacagcgggaatatccataatgcgctgttatgtttaataaaagggcggaatccggaacggttccgcaacttattaaacataattgcctattatggattttccgcgcaaaagctgcagcaggatagaaacaccggaagcaccccgcgcacgcagcatcacgaccgcacgcgcccggaggacggcgaagggcgctgacttccgtagaacaaatgcgtttgcgataaacacgggaaccccgcaccgcatggctgcacttcggactaacggcctgtttcctgtcgttcagacgcagggaggtagcggattgagccttgtcccggcagcaagtgccgggcagagcgaaaccgcaccgggcattgaaaacgactgagtacacaccgcatgggctaccatcgcataggctgtcgcttgtggtccggcttgccggattgctatcacacacctggcaggatctacacctgatcatcccgatatctcactcgttatgatagcagaattttcgccggcagctgttcctcgacaaacaatctgctatcacttttattcagatcgagatcttcttccggagaaatctgctatcaccttttcgactgacatcggcaggatgctctacttccggtcatcctccatcgtctgctgcaatctttcgaatgctttgaggaaatctcccacagcgattttctgatcctggtacttgcgttgcaattctcccttctcccgtgcctcctgcttgtagtgggcacagaatcgggggtattccttcacgatatactttatcgcttcactgccgcttttctttccggtgatggatttgagcacttccatctgtgcggcctcttcggctgtcagccgtagcgtgaggatgctcactttttcgctcataattgcccgcctccttcacttgccgattcattaacagccgctttgccggcccgattttcattattcagtttcgccgccctgtcgaatgcttcggcatacgtccggcacttgattccgtaacgttcgatcttgacgcctgcggctgtcacttcatgagccacgcaccatcctatacgcattttacggggatagtacagcgtttcttttgttgtattttcgttcattgtttttcgttcttttgagtgatcaatcaggaggcttctttcgctttaccgcccgggcttcctccggccactagtcccattgcatcccgcagtcgcttcaacaggaatagacgcggcattttgagacgtttgtttccgtgcatttcggcaagaatagaccagacaggatttccgatttctccatgccgtgagagctgcagtacctcctccagctctctttgcgacagattgtagggacgcagcgtgtttatcagcccctgcggattgcgctgtttctcttcctccgccttcacatccgcctgtggcggttgatgcctggcgatatccggtttggagctacggtcctcacccaatacggtagaagaaagtaaaactctcgcttcctcctccgtaagcgctccggaaggctgcgggggagtagaggaggattttctttgtttttcttttattttcttttctttgtctgttttttccggaatgtttccggaactttccggagtattctggaaagtttccggagtactccggaatttttgttcggccaatgttgcctgattcggtgtatcgtgttccgccgccccggccccgccttcgaagagtggcatcgctacaggctccctcatcggctgttccggttctacaagcaggatttcgagcggtatgtatgatttcttcttgctgatcttgcagatatcgagatatcggctttgaatggcacgtgaggtcagtatgcattgcgtcttccacatcacggggtcgaacaggcatacttcggcacagtaaccgatgatctccttcacccgtgcttcgttcatgtcccaatagtcggcacagtcaaagagctggtcttccgtccagcggatatatgcgccttccacccggtagatttcgttcagcgcgtattggtagacagcgtatccgtcgcatccgtatttcttcttcagacgctttatcttaatgtcctgaaagcggtctgtctccgctttgtagtatgaaaaaccgttcttgctcatattcttttgctgtaattggatgccagataattcatgatttcttctttgttgtataggaacgttccgcccagcttgtagaaaggaatagcctgcgctgcacgcaggtttctcaatgttgaattgctgacattgagtagcttacacacatctgcagagcgaataaatgtcacatcttcggagacattgtcgagtatgacgggggtaacgggcttgtacttcgcttctttccgttcctgttcattggctgtactttcggttttcatgattttcatgctattgttctttgttttcattgttctacttctttatagggattaatattcattttttatgtatttgaaagctattcggtcgagatcattcagttggttgcttttcagggcgtagatcgtttttataatccatcctttgaggacaatgctgcggtgtccttcgacgttgccatagtgctgcagtgcgtcattgagcgctctccccatcttctgttcggagatgaggttccgttcgtatgctatcatgctgtcgattgctttttgttccagggcttgctggatgagggttgcggttgttttcattcgtttgctgctttattgttgggtgattcttgtgattctttccgggcgtacatttccttaagggccgccatgtcgtccatcacttttgtgtccagaatcttagcgtagatttgcgtcgtcttgatactggtatgtccaagcattttcgatacggtttcaatcggtatgccatgagacaaggtaatagtagtggcgaacgtatgccgggcagtataagtaatatttagaaatgcaataaaaaacagaatgacgataattaaacgtaaaacgtttataattaagcattttgcgagaattgcagaacagacagacctgcaaaagaaaacaaaatattgcgacgtttcagttaccagactgttagccgcctgtttcggaaacgacggcaggtaaccgaatttttaccgataagaacaaagcggatttgtattcactgtttctcaatgttttgcatgccaaaggacgcttttcaaaggagtatttttacaacctaaaaaagagcgttatgaaagtggaaaaattcaaggtgctgctctacctgaaaaagagcgagccggacaagaccggcaaagccccgatcatgggacggatcaccctcaaccgcacgatggcgcagttcagctgcaagctctcctgcacccccgggctgtggaacgcgcgtgagagccggctgaacggcaagagccgggaagcggtggagaccaatgaaaaaatagaaagactgctgcttgccgtacactcggccttcaattccctcatggaaagaaaaagggatttcgatgccgccgcggtcagggacatgttccagggcaatgcgggcatgcagatgaccctgctcaaacttctcgaccggcataacggggaaatgaaggcccgtgtcggtgtggaccgtgcgcccaccacactctcgacctacctcttcacctaccgcacgctttccgaattcatcaaggcgaaattcaaggttccggaccttgtcttcgggcagctcaacgagcagttcatccgcgactatcaggatttcatccttctggaaaagggatatgccgtggacacgcttcgcggctacctggccatcttgaaaaagatctgccgcatcgcctacaaggagggccactcggagaaataccatttctgccacttcaagctgcccaagcagaaggagacaacaccgaaagcactcagccgtgagaatttcgagaagctgcgtgatctggagataccggaaaaacgcaggtcacatgtcatcacccgggacctcttcctcttcgcctgttacaccggcaccgcctatgccgatgcggtaagcatcacccggaagaacctcttccgggatgacgagggcagcctctggctgaaataccagcgaaagaaaaccgactacctcggacgtgtcaagctgcttccggaagccgtcgcgttgattgagaaataccgggacgatacccgcgagactcttttcccgccgcaggactaccacacgctcagggccaatatgaaatccctgcgcctgatggcagggctgagccaggaccttgtctaccacatgggacggcattctttcgcctcgctggtcacgctcgaggagggagtgccgatagagaccatctgcaaaatgctgggacactccaacataaagaccacccagatatacgcgcgcgtaaccccgaagaagctgttcgaggacatggacaggttcgtcgaggcaacccgcgatttgaaacttatcctttaatccctaaacaatcattatcatgcgcagtacattcaagctcttattctacatcaaccgtaacaaggtgaaatcggacggcacgaccgccgtcctctgccggatcagcatcgacggaaagaaatcggcagtcacgacaggcgtctattgcaaacccggggactgggacagcaagaagtgtgaaatcaaaacagccagggagaacaaccgccttgccgccttccgcagccggttggaagaggcgtacgggaacctgctgaggaaccagggagtggtcacggccgaactgctcaagaccaccgtgtcaggcgccaattccgtaccggaatacctcctgcaggccggagaggtggaacgcgaacggctcagggtccgctccaaggagatcaactccacttccacctaccgccagtcgaagaccacccagctcaacctcaggcagttcatcgaatcccgcgggatgaaggacatcgccttttcggacatcaccgaggagttcgccgaatcgttcaaggtctttctcaagaaggagctgggacacaggaacggacacgtgaaccactgcctgtgctggctcaaccggctcatctacatcgccgtggaccgggaaatactaagaggcaatccgatagaggacgtggcatacgagaggaaagaaacacctaaactaaggcatatcagccgcagtgaactgaagcggatgatggaaaccccgctgcccgacccgatgatggagctggcacgcaggacgttcatcttctcctcgctgaccggtctggcctacgcggatacgagggctctccatccccgtcacatcggaacgacttcggaaggaagaaggtatatccgcatccgccgcgccaaaacggacgtggaggcgttcatcccgctgcatcccatagccggacagatactggagctttacaacaccacggatgacgacaggccggtattcccgctgccggtccgcgacgtcctctggtatgaggcacatggaatgggcgtggcattaggcatgaaagagaacctgtcctaccacatggcccggcattcgttcgggaccctgacactgaccgcaggtattccgatagagagcatcgccaggatgatgggccacacgaacatcgacagcacgcaggtctacgcccaggtcaccgaccggaagatatcctcggacatgaaccggctgatggaaagaagaaagcccgcggccggcaaggaagccgcaggctaaataaaaactgccgccggaatcgtaaatgcaattccggcgacaatccttaaacttaaatacgatattataccaatgcagggtgatagttctcctccagcagcctctcgatgtccgactgcctgtacaggatcttcccgccaagctggatatagggaatccgtccttggtccctgtaatcctgcaggcacctgcggctgatcttcaacatcccggaaagctccctgtcggtcaggaaccgttccccgttgaagggaggacggttgtcacgggcaagacgttccacttttttctccatgtcgtccagcagggcaaagaacctgcggacacgttcgttctccttgtcgataatgccttccatctcttccgctctttaaaggtttccgttcttccttctttctctcacctccttctccttgcgtctgatgccgacgtagaccatcaacttctccacatccccgggcttgtaatagaacttgcgctggaggcgggtgaacgccagccgtccggtatcgcggagagtctgcagggtacgcggcgagatgtcaaggcgcaggcagacatcctggccgtccagtcactctccgggttccttacagcggtttctctcatacaatctgtccacacgtgcggacaggttctcggcgcgcgccagcatcctctcaaggacaccggcctcgatgtagcatatttccatattttcaactcgtttaaatatcagtgcgaatataagggaagaaaccatgagaggcaagcacgaccggcacactggcaggaatagtcatggatagtcggtttttgtcatatgggaaggaaaaagaaagccgaagcaggtctggatccactaccccctttgggtatgtgaaaggaacgttgtggtgaaagaaaaaactccttttcacacatggatgaggcaatgccggaagtccggcaataaaaaatgtggcttctctatccgggtaaatgccatgattacagacttcttcctgttcctataccatcaggtcggttaccttcaggttaacaacttatccaacctgtgatagatccggatgtgaaaagattactttggctggctattacaatataataagtagaatcatgtcaaatctactgctgctattgtttgttgataatggctggcagtagaacaaactttcgttaaaccaatacgttcattctttattatcaagtttttagactacctttgtattttattaactcatttaccaaacattatgggactactcaaaccgaatcaagttttgaacaaagcatatagacaggttgcgattgaaacaacagattttgacttattcaaaaatgcccttcgcacattgagagacaatattgtggatgggcaaagagaacacacgcaaaaagaacatttacgtaattttctgagtgaaacgttctacaagccatactacatggctcccgaagaagatattgatttggctatccgattggataaaactatcaagtccaatatagggttattgattgaagtaaagagtaccaccaacaaaggtgagatgatttctaatgacaatcttaatcgtaaggctttgcaggaattattgctatactatcttaaagaacgtgtcaataagaagaacaatgatattaaatatctcatcgctactaatattcatgaattctttatttttgatgcccatgagtttgaacgcaaattctatcagaacaaacaattacgtcgtgagtttcaagactttgtggatggacgcaaaaccagtaacaaaaccgatttcttctatactgaaattgcaacaacctatattgaggaggtgaaagatagccttgaatacacttacttcaacttacaagactatcaacacctgcttgatagaacagacagtagcgcttcacgcaaacttatcgaactttataagatattcagcgatacacatcttttgaagctatcgttccaaaatgacagcaattcgctcaaccgtggattctacactgagctgctacacattattggtattgaggaacgcaaagagaataataaaaccgtgattgtacgcaaagctgtggaacggcgtgacgaggcttcattactagagaatactattaaccaactggatgcagaagattgtttgcgtcacataaatggtcgtttgtatgggaatgattatgaggaacggttattcaatgttgcaatggaattgtgtattacttggatgaatcgtatccttttcttgaaactgttggaggctcagatgttgaaataccacaatggagatgcaatctataaatttctttcaataactaagattcatgactatgatgatctcaacacactctttttccaagtgcttgcacgtgacatgggcagccgcacacactccattatgcgtgattttgcttacgttccctatcttaacagttctcttttcgaggtgacagatttggaaagtaaaacaattaagataaacagcctttcacaacgtacggtacttcctgtcttggcgagtagcgtattacgaaataaaaaacgcaatctacaagtcaacgcattacccaccctgcaatatttgtttgcttttctcgacgcttataactttgcgagcgaaggcagtgaagaagtgcaagaagaggctaaaacactcatcaatgcttctgttttagggcttatattcgagaaaataaatggtcacaaggatggttcagtattcactccaggctttatcactatgttcatgtgccgtgaagcaatcaccaagaccgtgttgcaaaagtttaatggttattatggctggaattgtaccacccgtatagaactatacaaccatattgacaatatagtcgaagctaatgaactaattaacagtttgcgactgtgtgatccagctgttggttcgggtcactttcttgtgtctgctctcaatgaactgatactcttgaaatacgaattaggtattttggtagatgctaccggtaagcgtatccgcaaagcggactatcaacttgccattgaaaatgacgagctgattgttaccgataccgaaggtaatttatttgcttacaacccactcaatgcggaaagtcgccgcatgcaggaaactcttttcaaggagaagcgtcaaatcattgagaactgtttatttggcgttgatattaaccccaactctgtgaagatttgccgcctacgactgtggattgaattgttgaagaatgcttactatacggctgaaagtaattacacttatttagaaaccttaccaaatatcgacattaacatcaaatgtggaaattctttgcttcaccgattcgctttgacagacagtattcagaccgtactgcgagagtctagtatcagcatcagccaatataaggaggctgtagctaaatataaaaatgcccaaagtaaaagcgaaaagcaggatttggaaacgtttataacagaaatcaagtcgaaactgaaaacagagatcaaccgccgggatgcacgattggttagattgaacaaacgccgctctgagttggcaaacttacaagcgcctcaactgtttgaaccgacaaaaaaggaaaagaaagcgtcggacaagcgcattgccgatttaaagaaagaaattgcgactttagaaaatatatttgaggaaatacgctccaacaaaatttatcttggtgcattcgaatggcgtatagagtttccagaagtactcgatgccgaaggcaacttcttgggatttgactgtatcattggcaatccaccttacattcagttacaatctatgggtaagagtgccgatgtattagaatgcatgggttacataacttatgcacgcactggtgatatttactgcctcttctatgagttgggtatgaacctgcttactcccaatggttttctttgctatatcacgtctaataaatggatgcgtgcagggtatggtgaagccttgcgaggttatttcgcaagcaagaccaatcctattatgttggtagattttgcaggtataaaaatattcgatgcaataacggtagaagcaaatattcttttatctcaaaaagcagcaaatatttttaacacacaagcttgtttggtacaagattcgaatggcttgaataatttgagcgatttcgtgcagcaacaaggcgtgaagtgtaactttgcagattctatcccatgggtgatattgtctcccattgaacagagcatcaagcagaagattgagtctgtgggaatacccttgaaggattggaacatccaaatcaactatgggataaaaactggtttcaatgatgcttttatcatttctaccgaaaagcgtgatgagatactagcgaattgtcaaacagaagatgaacgtgttcggacggctgaacttatacgaccgattcttcgtggcagggatatcaagagatatgaatatgaatgggcggacttgtggattatagccacatttccttcgcggcattatgatatagaaagttatcctgcggtgaaaaattatcttctgtcaattggcatagagcgtttagaacaaacaggagaaactcatattgttaatggcaaaaaaataaaagcccgaaagaaaactagtaacgagtggtttgaaacacaagatagcatcagttattgggaggatttttctaagccaaaaattgtatggaaaataatcggaaaccaaatggcttttgcatatgatgccaacaattatgtaatgaacaatgcctgttatattatgacaggcgatcatttggattatctgttggcagtattgaattttccaataactgaagtaaccttcgtgtaatcatacgagtctgtgatttcctgcgtttacgcagtttgctataagcaagataggcacggcgtacatcaagatacttgttacggggacgttgtatgtgcaaggtctggcaatgtttgcacagatgacgatgaagccatacaataccttcccataagagtttggtatcagtaggaaaacgcagatgactttcataacaggtggcatcggtcatacagacatgaaggttctcaagataaggtttccaatgctcggcaagaatgagctggaggggctcaacgtcaaggcgatgcgctagttcctgacgaattgcactaacgattttaggattggttagtggatgaagcggatcaatctgaacaccacaaaacaactggtaatgaatattaccgtttaaatgctcaatcagttgtgcatcggaaaagttggtataggacttcaagaccatcaaggctattttaccttcgggagaaaaataacttttacgacccaaagcagaggacttcaaatgcatttgtcgggccagttccgagaaaggaaacagagcatggaggcgacctaattcactcgttgcaaaactttgacgatatttttttagcatatcgaactcggtaaaacctaaacgaggttcgatttctgagattttttgtatctttaccatgtgtttttattttagattacccccgttttggccgtcaaaccgttttttggggggaatgcttaaagatacaaaaaaggcaactaactcgcaatgaattagttgccttaaattttattattttaggaatatccctgttttaatgattggtgtctggaactggttgaggagttatactatagacatttactgaatgtccctgtatagtgtcgataatattaaagaaaaacttgttatctccctatatgccaaaggaatgagcgtgtcagacatagaagaggagatgcgtgaaatctatgagatagaactgtccacatcagctatttccatcatcacgaacaaagtcaaccaggctgctcaggaatggcagaaccgccctttggatccggtctatctcatcgtttggatgattctacctattttgacttttcagcctattaattgttttggtaacttcgttcattagcttttgattggaagttctaaatgtgttaagttctttgattatatctgctttattatagtataaattataccagcctaatgtttcagcagccaatatgcgaagttcttcttcttggctttcattttttataatgttcagtaatggctcaatagctttagcaataggtttatttcggaacctacttatttcgctttgtatctgtttggtagtactttccggactgtcaataagtgcaaaatctctttcaagtcctttcttttggcgaggaaggtattctaacaattcattcacataggaagaatcgtagaaagaccaatcggcagcctgtttcttcaattcattcaaagccatatcatggtcgaacgtgttgatagcactaaaaattctgaaacgatggcggttttcatgtccgcgtaataaatagctttctatccatgccggcaacaattccggattgcaattcttttcaacgtattccaccgcataacgacggatcagttcataactgtcgttcatggctgtctgcaatacatcggcaacctctgtcggatagttcaaagctaataggcgtaatgcttccaaccgcacaacgaaatagttcgattcgtggtaacttttcttcagcaactcaacgagaccactataatttgccattgacaattgacggagcgccattgcctgcatgtcagccataggggaattcagctgttttttccagaatgtaacatttccttcctgcgcaactaaagcttggttgatgtccatatccagcccggcattattggtgaagtgaaaagtcgggtcaccgatcagatgattttccaagaagcaggtaaaacgagtgaactgcccgatgcgcataccggcagctaacaagccgagaaattcatccggccatttatcttgaatggtgttaaccgtacatcccatagtagcaatggtcttacccttattgaatatataagagcctacaatgttgtcatccaaatggaaagaaccgttgaaacaagcatcgaacaatataaaacgcgcattaggagtcaaaagacgaatatcttcagtatagatatccatattacggtttacaatggaatccgattttattttctcctcatcgaaagcttccgcacaccaactttcaggcaccccatactgcttggcatattctttgatagcagcttcacgcccatgtttcttggcgtatgaaggcactttgcttcgcaagaatattttggcattctcaatactcaaattaataccggaaccattttcatagccattgatatactgcatggtggggccaccgtggtgatggaatagcatgacatctaatccttcgcgctgaatctcgttcaagtataatggtttcatcggatagcgcatgttaaaatcatagaacttcactgtattacccgatttgaatatttgcggcaattgctcacgtaaggctatttgctcaccgctccatgccaaaggatcttcagaattgtaaccatggccacgggccatagtcagttggtcaaatgcattttgctttgctttttcggcaactgccttttttaagtaatcgcgtagcatctgataacggttctcaccttctaaatgtaatggacggatacgggccgaataaatatccggtgaaatatactgtttagaatcagcacgcaatgtcatataatgatagtcaggtatcaaactgtcttgtttaatataatcaaattttaatccgaagtcatcataataacggtcggaaggaacgcttgatttctgccaattggctttgggagaccttttgaaagccgaagatagatgatgtgcatcacgaatcattggaatagggatgtcacctataaatacgcaaccctccaaaggcgttttctcattctcatgcaatttgacaagttgctcacgaataggttcgggccttttccaatcatcaattagcaagtaagtacctaaaccttctttttctatactggtacgataagcatcaatttcacttttcgcttcatcataacttttctgatcgactacaattgcaaaagtagtctttgtttttatactaggatgtacaactgtttgcgcctgcatatcctgtaagcacaaagcggtaattgccaaaaggatgtatttattcatatttataaacttaatcttttgattgtctgttcaagctctgcttttaaatcttccggaagattggctgtttgttgcatcttctttatttcttcaagaatgtgtggccgttgtacagaattagtaaaccaacctaatgcttcggccattactacacgtacttcctgtggattaccggcatcacgaattacattcaaataatcatccacgtggaaatggaatgtatagttacgcacattgcggattgcactgatacgttttgcttccggtgcagctacatccatcaaggtctgatggacttttgcctcttgtacaaacattctttccaggcttcttagtaatcgttttttctcttcgttttcattcaaacggtcaacttttgcataaaagtcttctattgtcttttctactttctctttcggataaaggcttaaagccttgttggcactcatttgtacgcgtaagcgttcattatgttcgaccaatgcttccacaatagcgggcaataaggaatcgtcacctacaaatccagcataaatggcactttggcgagctaccatttcataagtatcgttcaaaccttcgcgtaatgcttcgatgaagttgtcgtcctgataacggctcaacaacttgatagcttccatacgaaccgtattgaagccactttcccggtacttcttcaggagcaacggagataattccttttgggtatcggcgtcagccagcatacgcatggccaaactttgtacatcagcgtatgggctgtttaacaaattcttccaataggctttgtcatctttgtgtattgttatatcggtacttaaagtattggcttcgataggagcaaaacggaaagtgggatcaccaaacaaatgaccttcaagtgatacgattagcttattgtattgcccggctcgtacaccatgggacaacaaaccaatcatttcaatagtccagcggtcttgcaatacgttacgggtatttccttgtgctactaatgtctgaccgtcattaaagatatattgtcctgctatatagtcgttttcgtgaaaagaaccgttgtagcacgcatcaaacattatcatcttcggattagtggaaagatttctcttcattaaatcttccgttacgatacgttcatcagcgtagtgaagagagtctgcttcccagaacttaggattgtccaggtctttaaaaaacacctcattcacttgtcgtttttcctgcatctgaatacgtaaggtgtctttgtcacgttttccaacatgggacatgactgcattataaagtgtactcttcaacattttataacgattattgaaatcagtgcatgccaattcatcattaataagctgccctgttggcattccatgttcatgaaacataaataagtcaaggtcctttcgttgcaattcgctgaataacttatatttcatagggtgtttcattcggaagttccaatgtttgaatcccatttgacgaccaaaagctaatgcaaagttctccatataagctttttcgtcatccatccatacaatcaggcaatcggaattgtaagaagcaccattgaatgagaatacccgatctaattgattatgcttatctgccttggcagcagcagctttcttcagatatgaggcaatggccgcatatttatccccttcctttttttccggatacttgatacgagctgaatagaaagtaggatttagccgctggggactgtcttctgtcaatttgtagtagaaatgctgatgatttactgagtcttgcctgatgaactcaaactttaagttcagatcatcataaaagcggtcggtaggtacggaagactgatcccaaggaaaggctttctcattcattttgaatgcagtagtcatgtgttgcgcattacgtaccaatgcgacaggcacatcgccgattaaaaccagaccttccaatgaagggcattcttgatatgttttgatgattatctgtttgacttgatctggattttgccagtcaccgctgatcagataagttgccaaaccatcatcttcaaccgcagttttgtactgatgcatggcatctttggtatttgcataagtttggttatctgttatgatagcaaaagcggtaggttgtttgaccaatggctttatgactgttgtttgtgcatttcctgccaatggcaaaagaaatgccagatatattatttttttaatcatggccaattaatttttaagtctgtaatatgtacggtcggcttcttcacgaaggttctcggataagctcttatcttttctcagttgatcgcatacccgaaggatgtcaggcttccgataagaatgagtgaaccaagcaaaagcctccaataaacaggtttttagcttttcactttcactggagtcggtaagtaaagccaagaggccgtctacacaggcatgtgccatatgatttttcagagaattgcaataaaggatgcgccaacgttcggaagtttctttgcttaataactctttttgcatgctacgactattattggcattctccaaaaccttacgcatctcctccttgtcttgcaacacataggtctcagccattactttatcaattgccgcctgtacggctgcctgatcaaagacttgaagccccaaactcacattaaatgccacacgctcggataggttgtcttctacataggctttgatttgcggataaacatactcgttcagtcccacatgttgcatcatacgaacagaggtgcgacgaataaattcataggaatccgtaatggccaagtgtaagacttcccggaagtttttgtcactaatcttctcaagcaatgccaagcaggtgaaacgtaccatcatgaacgaggaagtttcaaaagtttttcttaataaatcagaaatacccggatagtcattgcgataaaggttgtgcaaagcaaaattctgtatgtcggcatagggcgactgtaataactccaacatgcgggactcgctatatggttctttgaacaaagcattggcatctacctcattgatagattgaaaacgtagagtagggtcaccggtaatgtgcgattcgagaatattcgtcaatttagcccattgccccactcgtgctcccatacctaacaggccgagcatctcgtttgccattttatcttgcagtacattgactgaattggcaaaagtagttacgcattttccttccgacatgatataacgtccggcaatgtaatctttttctcggaaatcaccattatagcatgcatcgaaaattaccatacggctattaggcttaaactctgtaacttccgacaggataataccggtgcgcaggtctagtaaagaatcttctgcaattactttgggatcatcatagcctgcaatccaagtagtgtccaaaccgtatgtgtttttcatcatatccagcatttcgtcgaaagactttttgttgttttgctttctacgcgctaaaccacgataatagtacttcattgcatctacatgagcattccacctattagtagcgggactaccggaaagatattgacgttcgggcataccatgctcatgaaaaatagacaagtccagatctgtgcgtttcagcatattaatgacatcgtccttgggataatcgctgaaattataacggatgaaacgggcccgtccctctttatcgaatacgcccggcatttgttcgcgaatagtaaaggtttccggtgtccatgcagtcaatgagttagagtaagagccatcacctgtataggagaagaattggtctaatttattgtttatctggtgctcagccaccacttttttaaaatagcggctgatttgcgcatgcggttcttcgccgttatcaacagctttgacacgtgcagaatatatgtcacaccgaatttgctgtggagattttatagccaaattataatagaagaaattattttcgacactgtcctgtttcaaaaaatcgaattgtaggtcgaaatcatcgtagaaacggtcgctgggcactgaagaatctctccagtcattgtttttctcatccattttaaaagcggaagtcatatgctgggctttgcggagcattggaatagggatatcaccgacaaataccactccttccaatttatcctttttgtagagcttaacaataactttctttacatcttccggtttattccattcattgtatacgatgaacgtaggcaacccttccattcctagaatctcctgataggctttaagctcggcttcacaagcctgaaatgtccctttatctgtaattacagcaaaagaggtgtcctttactttcacagccggtttaacaaatgtctgtgcccgcagagataatatgctgcagagcatcaaacttccagttattaatttacgcatgttttgtaatatagatttcgttatgtagcattaaaaattacatcctaaacttatcgataaatgagtacgcccatcataatcatagtcagaggtatttacacgatcgaatacaacttttgcaaataagttcatacgtctgttttctctgacttgttgcgaatacgttatcgacccgccaatacgatagtaatcacaggtataataattagtcagcccttgttgtaattcggttacagttggatagtctgcatggctgccaccatatacatattcacctcccagattattgttatacgcaacatgaacatctattaaaagcctgcgattcaaactattgcctaaaacaaaattttttttgccacctaagcctaaagataaattttctgcattctgtacagaattaggcattaaatattcatcgtcttgcttggtataattcacatttaattctgctttccaactatattcattcccgcggtttctgcttaatgcataattaagagaagcggtttgtgccttgtacgtagaacggatgttattatataattccacccagccactttgtgattcagagttatcgcgttgagaaatatactgaataccatcgatgttacgatttgtatatgtggttctcatataattggtatagtcctttccttcctgaatcatcgttaaagaaacatgagcagttttatcttttacaccggctatttttttaggagtcgtatagctctgctgaacagtttccgcttttacatcgtaactgccctcaagcagtaaattgaaagagggcatactgaagttgtactggagagctccaccgaaatggtctccaatataattgctggttacaccgctgcctattccttttatggctgttcccaaaccgtataatatataatagtcctgatccacataagagttgacattactcattcttgagtcttccttgatagaactatacttgaaacttgcaccaaacttgtgtgaattattcaacttgtaagtaatccccggcgtcagtcccagcgtataaaaacgggtatccacacgcgggtcgcgctgtttggcagctaatgtagctacataattaccttccaaccccaatgcccaatgattaccaagtaaaggagtagctgcacgaaacttcagatcgtaatattgatttctccatttgcttaagtgctggtctgcgacatagtaaggcattcccctgaatggatcggcaatggaggcgttatatccggcatctgtcagatttttttgtgcaaaattaaatgctccccacacatatgcatttttcagattgataaagccttcactggatacacctacgatagcctctttctgcccctcttgcggacggcaatagtttccgtcctgtaagtcatatcccaatataacattcgaataattctgaatatcatcgaatggcataccggcagcattctgtgaatgagaccatagtcgtcttgttttcaattgttccatagcggcgggagagaagccctgtgccgctcccaccatacttacaaggcaggctatcattaccagcaggcagcttttcatatagttcatatattgttttttcattgttctgtctttttagttaattattacaatgtgtgattccatgaaggcatttttgctccattacgacgcattacaggaacaacgccacgttcaaagtcatccgtactgttgtttgtatcctgatatatatatgtacctgtttcttcgcgaataataggattaccttcttcgtctgtggacaatttgcgagcaatacctaaaccgcaataagtagctcctacccaagtaatacctgcatcaagtacaccggggacacgttttgcattcatctttgactcattgtttactgcttcaacagcatccaatacatatttaataggtatttttgcataataaacattgctgttcggtttgctaagatctgttgtcttcatattttcatcgttgaccggatcccaagcttctccttcaggaacacgaaaaatcacataagcacctccgaatacggatgtcaaatattgtggtatacttcccatctctgcttttccttggtagaaaacatgttgcatatcataagctgcctggtcagggaagtttggattattcatattaaactcaaactcagaactactgccgtctataggactttgagggttatagatgtccaactgatggttagcggcaaattgagaaatgatgcaagattcacctggcgctaacggatattcggttccatttcctggaaatttccacacacgttctccatatgcataattattaccgtccgcttccggccaaataggtaatttagtggtagctgtacccggagttaaatttgcgaaataaataccgtccaaatacaaaatgtcagcagagttattgtatatctcatagaactggtctcggaaatagactcctcctttttccggacggctaccgcaataataaatctccttgaatattaatgggctcactttaagcccttgtacttcaatattcaatgcgctaccatgcttaaataatgccgcatttacagaattgccattgatgtagtattcattgttttctgtatcgatcgctgtaccggatactgttaccgaataaattccggggataattccgtcaactttcacactattatcagttacttcttttacataatgtaaatcttcatcgtaattgtcgaactttacagtcagatctttcagtgtggatatattttcaacggtaatatccaaatatacatccactgtgataggattcacttctgctgtgccagacatgtccctgaacgaatcgcatcctatcaaaagggtacttgccaatgtaaacaaatatattaaatattttttcataacttcctaaacattataaagtgagtgataattccagcccaaagaaaaatcggttattcaattgaatatatgaacccggattacgtttggattctctgcgcggataacttctgaacatattgttggcaaagaaagaaacacgtagcatattgctaatttctttagttacattcaagttaaaacaaaaataaggactgtatgattcttttatagcattattatgacttacattattcaacatatatccatatcctgcatcctttacttgctgggtagtggtatatttccccttgggaaacatatttacagacgcatcttccaatgctaaatagcccacaggtatagaatcgtttccaaatgtattccaattagactgctgccaaatagcttgtgctgtcatcgtaacaacaaaaccgatacgcgggatattgtgagtggcacgtaaagtcgttacaaattgttgtttgtaacttgcattgccttcttgagaataaatggccaccggtttacgggctgaagcagcatcttcgctattgtcatagaagctataaccctgacgccaactcttagtacgcatccatgagccatttatttggaaggccgtacggatagcatcaatacgtccgatattcaaatcaaattctaaacctttagtttctatatttaaattattagttggttttgcataagtagacaataccggtaggctactactaagctctatcccgttttctgtgcgctggtattcattgtagataaatgtattgaaggtgttgaaggtttggctcattacataaccatccttcagacgctccttataagctattacattcagattggttttacccactcgtaaattaaaaccgacttctgctttatgattttgggcaatcttcaaatctgagttatctacttgccgaacttctgtggtagtcataaacaagcgctggctttccggaatattttcattggtaagctcatttatattgatatattcaaaatatgcattttctggatataaatagagaagagaaggcatctttgcagcaataccgtaacctccctgaagacttaatagattcggaatcaaatcaatggatgcatttacacgtggcgagaaaatgcctcctactactgaggtatgatcataacgcacaccagcctgaatgttcaaatcatgcgtaccgcttatggaccatttgaaattatcttccacatatgcaccaaattggttaatgaaaggaatatccttatagttacgtggacggaaagatgaattatgaccgtattgactacgataaggaggagtacttgggtcataagtttttcctttaccaacgttaccgtcactccggaaatccgcaccaatcaagatgcggttgtttacatgaccgctcgccttgaatagagaactcgtcactttagcaaacaaattaacttcacgactatcgatctcatagtgtcccaaatagctgcttggtagataaacagcataatgatttatgtcttccggtccaaaattagtaatttgattaccattggcatcatagatatgctgacctgcaaagttactaagtaccgcaccgtttgtagtggtcatggaataaggagatgtagcagaactgtatacggtttcataataactgtctttatccatatacgtacctgacaatacatagcgtagtgtttttaaccagcccttatttatattccatgtaccattggtattcaaagtaaaacctatatcgcggccttccgaagctgttttagtttgttcatcatcaggattacgttcacgttgatccttaccataaataaaatcaaagctggaattggtacgtaacttattattaaagaaagtatttgaatagagcaactttgttgtggcacgctgatagtgctggtaactggatattggattattcgtattataagcataatctgcacttacatttaaagcgcctttcttttttccaagttcaaaaccggttcccatagacacctgatagatattgggattggcttttgctttgacacgtagcggctcacgaccagcttttgtattaataattactgctcctgaggtcagatcaccatattcaacagaagggataccacgaacgatttgtatagactctatattttcagtagaaatactacgaacatcggttccaccagccggcgaggcacctccggccaatgaagcgggtgtttccgtaccacttaataccgtagggctcatcgcagatagattagcattatttgagatgggggcaccatcacgaattattgcggtgcccatagcattcatcggagcttccggaccactggaactggaaacttgacggatgttaatctgttgtgccgaactcatatcttgattctgtgaaattccacctggcatcaatgacattacatcatataaactggtcgcttgcatatggtccatagcagagcgggaaatgtgagaagatgtggatttgcctgaacggctgttggttgcagttactgtaacttctttcaacttaaaatcctcattcctcattgtaaaattaagaaccaaatccttatttacatttattaaggtgtcaatggagactttgcccaaatattgaatttgcatacgaattttaccagtaggtacgttttccagtatgtatctaccattttcatcagaggttgtccctagtgcaatttcaggaatagacacagctgcaaattctaaaggcaaacgcttgttgttgtggtcgtactcataaacagtgcctgtaagttttactttgtaattgttttgcgatttgatagggagggcaattcctatgcaaataagtataaacaagtatataatattacaccccaaaataccttttttcataagtaacatcatatttattaataatgcaaaattatatgtaaattttaaattaaaacaaaccattgtgtgtaacaaaactaaaattattaaaaatacatgttgtttttgttggtgccgttgcataatctcacagacctcaaccgtctgttgtctaacaatatagcaactgcattatatttaggaaaatccaatatatattagtactttatttaagttccatacatagtaatacggatcttgagtgattaaaagcaaactgcaaatctaaataaaaaacgggatggttgtagttctgatatgctatatcttaatacaacgcagataaatacttatattttcattgatagatctaactaagttaaaaaacggattttctccaaaattcttctgatagctccgttccagcctcatatttatcgcactttacagaagccccagttcaaatataaggaaactgtatctctcttcgataaaagatctattttaggatgcaaaattagatattacaaaagattataaaaataccattttttgggtataaaaacgcatctaatacctatatataggtattaaatatcattggcaatgtatgttccatttcattaagcaaacaattttttgtataaaatacaaatagtacttttttacccacttaaaaagtgcaagaatgtataaaagtccatgtgtcagctataataggggcatgaataggcatccgttccatacctgtccctatttgaatcggtcaccccacagtgaccggacattactcacccaattcggattctcattacagtaggcaacgaaaatctgtatcaagttccaaagcccgagaatcattccattaaacctggcaggaattgtgacaacatgtctgcttgaaacagctactattatggtatcatgctgtattgttatgctatataccatgttctaagtcaaaactctttttttttagaattgaaggtttaaggctccatccgaaagtcaatatcactttctcaaaattcttttctacagcaccctttgtataagttaggatgtctttctctagaaaatttttgaaatcagatgaactcatgtctctaaaaatgtttatatattcttttttaagaaattcatttatggcatgtgccgatatctttttttgcgtgcacttttctataacatataagttgcttggtaccggtaccatcgtgtccagccccatgaagatattacagtctaccataagagtataagcgccgctctcggcaagaggtgcggaaatgcagtaattggcttgctcaagcagagaatccaccagttcttttgtggaagaactgatactattggccaattgttcatatcctcttagattcagttgggatatggtcttttcgatagccgggatgaatttcattcctggacccaggttcaaatcaaatcttttgtaatagacaagaagctcattccaatctttgtaccgtgaaggtttgatgatatttacattgtctataccatgttgtttaagatactcgccggaggaaaatgcatcttctttgaaggtctgtgtgtttccatccgggaaacttaaatagatggtcttatatgtgtctccagtgttggtccttgcaaaagctttacattcctcacctttgagataatatgctgtggtgatgtcaaaaccattaccgctggcatcattgtcatagcaacaattccactttaccttatcagatgggaatatacggcttatattctctatttgggatttggtgacatatccccccgtgcttatgaatgcgcatgtggtttctttagtataatggtttatttcgtagaaactcattgcgtcaatagcggattcaaagagatatatgtctgtaaccttgtcaaaaggaacaaaattggccatccaacagctttgtgccttgtcaccacccgtggcaaaggctttataattggtattggtctctgcaaaatagttcctcatttcaaagttaaggatttccatctgggagggtttgcggaatggaaagccgatatgattgttttttcctacctggtagatgaacagtctattggcgaaatcctccacagtctgtggagagagcttcctttggacggtcaaatatggattatcctttttgataggacgaggattccaataattcaaattggattcaatatcatttggattcagtcccagcagaggattgtttaccgtttcggtatcttcattggtgatctgttgagtaggcattggtacaccatcaatgacgaagagaggctgggttcctcctgtgacggagttgacacctctgattctgaaagtcattccgcttgacaatgaaccgtctgtggggataatctgtactccgctgattttgccttgtagtgcttgcaacgtctgcgtagaactactgtttacaatatcttttatattcacagaagcaacggcggttgcaatatcactttttcgctggctaccatagcctacaacaaccacctcatccatctctgtgactgaagggtctagaatgatatcaaatcttcggttctttccgatagtgatagttttgggcttatatcccagataactgatgaccagtttttcagaaggaagtacttttatcgtgaactttccttctaaatcggtgattactgcattggtggtaccttcgatatttatcgtggcaccgataagaggttcactcttctcatccaacacttgccctgaaatagttacttgctgtgctaatgctacagtgaaatgtagtattagaaacaatgtgcttaatagtacttttctcttcatagtgcagatattaaagtttataataaggattaatacaattagatttaaaatggtagtgcaaataaagcgaattataatatccatgttttgacctattgtacttttctcttgaccaaattacagactttttcttcaaaggtaatcgctttctattaatttcatttatcaccgcgtaaaattattcgattggactttttatagtgagtattatcatggggagtattaaaaaagattggatatgaaaaatagtatgttaaatcattctgttttctcaaatatgcagtggggtgtgagcgcaaggaaaaatatctgtagaaattgataataatgtattttattcaaactttccatttatccaaactctatcagttatctgcacttaaatcaggctttgatatttcaagagtttggataaatgattaaggattcagtctgcattaataccgaacatagcagtcagtgaacgattgataccttacgttcgcatcgtgcgaagtctattcctttccacacggttttgcgtccggctgaagatgcacactcggcttgcgccttgttcctttgctgtttctttatacttgaagttctacaattcgtttcacaaagaattaccctgtggaagtctgcccgctttcgcgtagggtgacgttgaaacctttatccagggcattacaccatggcattcgctttctccacaatcctttacccgcacctcattcggccgctcttacaattggccacccatcggttattggctgacgggagagatacgggcttaccaagtttcgcacaaataactgacgaccgacttagactccgcctatccaccagcagtgcgacatccgtgtagcacgatgtaacagcgtactatcctgactgcttgccttttggaatggcccataaatatccgtgagctaattcatagtcacgatggtacggcgattcacttaggttactcatatcagtcagctttgacattcttcgcctatgatgcttaggttggaacgtcgttgtcaagagggcttcgcacccgaccgttgccagtcacgtacgcctcttcaggctactattgatggaacaataggttcagacacgatgctgaacaattacttgtgtgacctcttggcgcacattacactactaaggtaatgcttttataggagaagtcacatctgtaaaaaacttattatcatgcaattatcttactttatcttaggctaaaagcccttattcaaggtgtctgtatcctatcatccgctaccgctcggtatcggattcctccagaccgatggcatggcatatctcctccaccagttcaggaaggccggagtctttctcctgacggggatcgggtggaaacagcgtggaacgaaagacacccttacagacagggtccgcctccttgttgtagcggagggtgttcggaatgtgtgaggacagcagccgcagccccatcctgtggatgacccggttccaggcatcatacaaattcttccgtccccttctatccaccatgttccagaacagccggattcctttcaagttgcagttccccttggcgatcagctcctcttccagcaccttggtaaactgcagggaactctgcatgacgatattgtccgccttgagcgggacaaagatatagtccatcgcggcaacggtatgaaccaccccctcgctgcggagcgttccgggaaggtcgaagagcacgatatcgaaagtctcccctttttcgtccatataacgccgcaggtcttccacccccttttccgggtcgcttttgatgaccggataggcaggcttacggattctttcgtactgccggtacaggttcaccttcaggtcgtcatttttcatgacattctccatgtccctctcacgcatcagggcgatgctgtgctgcggggagtcacagtccacaaccgccacacgcacgtctttgcggtaatgcaggacactggccagcagtaccgtaaagacggattttcccacgccacccttctggctggcgatggcaaccaacaactctttttcttttttcatcatacttctttttcattaaaagttaaacactattgtttcagaaacaaaaataatgctcccatcgggggagatcccctgtcatgggggacgagcctttatgaccgggccgggcagggactcctccagaatcatgtccgtcgtttccctgtattcttccagatgccgcgagacaaggtggttgatgaacccctccagagtgacctttccgtttctcgaggctcccgccaggatggacagtttccggtgcagggcggcgggaatatgcagcgaccgacgctgcacgcccgcaatgccatgcaggtattcctccccgtagacggacggttgcatggggccatttttccttgcgggacgtataatgtcgttaccggacattccacgtctcttccggggacaggcaggcgcttcccccatgatctcacggatgcggtccgcgtccatcccgccaagaccaatccgctcttttacgttctttcctgtcatgatatgccttcttggacaatgacaacgttttatcggcgaggtgttcctcccggctgtccgtcctcatcccagggacggtagacctcaccgagcagggaggcgatgtcctccctgtgttcctccatatggagttccaacaaccggatgataaaaccggagatgctgccgcagccggcggccctgaccagcatggcgatccggcggtgcagtctcccatcaatgtaggcggtcttccactcagcggctctgggagcgggaaccagaaacctcctcttgtattcctccggacctgtcactttccctgcccggacctgacttccatgacttggtatctccaccactggttccagggatggggaaacgggagctgacagaaggttccccgtgagtccgaccctctcgagaacgatatcggaaagccggttcttttccttttctgaatccatattttaaaatcttaaattattaaattacacaactggtattgtctcggaatacaaaataaaggaagaagagaacaggatgaaaccacctgtcacttatagtcatccaaagtcagttattgtcatgatacacatgacgggggggacggagatgccgttccgttcggacggttcttcctatgcggaggcgacatcagaggcccgtagtggtgtggaaaagcgagcgggattccgtttccttgtccaccgttcctttttaatccttatgggcaggcgtgagagcgcgcatccgtccggatacggattcttaaattatcggtctatgggagtgtaaaagtattaatccgttaatggagaattatgaaggaagaccataaggtgtacacggctacattctccatttgcagaagtgtagaagtagtaatccattaatgaagataatgcagaaaaaccataaaccatatacggctcactgccgctctccatttgtagatgtgtagaagtaacaatccattaatggacaatagggcatgtaaagggcagatttcccgtatattcgcctccttattcccgaattatggacgtaagtcatatgattatggagagatatccacccttttatggggagagcagccggcaaacacctgatggaaatgcctcgtaaatcacaggagaatagccatacaatgggctaatacacaataattattggataaatgtggtccgctcctgcggacagcaagttgtgttttcgtttaacgaaaacaggacggtttaacggagaatacaccgataaaccgttacttatttcaagctccagcgtcgctttttacatatctaactataattcatttgaaatcacaaaacagattgaaccgaatgtggttagtttgtctgtttatttcatgtccgaatcattagtatgctatgttgcaaagttcgtattcattatgaaaaaatccgcttacgagaacaagatattcaggtaatttgccatcctttccccaaagaagttcgatgttaaaaagttcagaaagcgttttggctatgtcaaatccgaaggcttcgagtgacggacgcactttttccgggtgtcggcatggtgtgccgcagttacgcgtacactcgttatctgagcagtgaagacatttacctatataggcaaatgaacgccctccatatttccgttccatatccaataattcgctctcgattcgtatccgttccggtaaaatgagtttttgtgtatattcaatcggaatatctttgtcttcagggattatcttcgttgccataagatgtgcatacttgtattgtcggagaaacgattccgtatcaaaatcaaatggaggacacccccaacttttaccgtaattggtacattgtttgcaaagttcaagaaaatgtggttcgtcacggaattcggcgatgtatccttcaacagtgatgtctgaagtaaaattttctacagtgtatatactcattgtttcaaaatcattgtaccgcataaggagtcgaaacggatgttttcattttggaaaagtctgtcaatgtatccgcttttctgcatttcagacgcggtcaagcaacttaaattcggggtatctaacaatgctatcgaatcgcacatggacaacgcgatgtcaagttcatgtgtcgagaacatgatacattttttctcgtcgtggacaagcctacgaagcaacgccacaagttcgtagcgattaggcatgtcaagaaaggaagtcggttcatcaaggagaatgataggagtatcctgtgccaatgcacgagcaatcatcacacgctggcattcgccatccgacattttatccatcgtgcggtttgcataagcctccattcccaccgaaatgagcgattgcatgactatctccttatctgtttcttgcatcctacctatccagttggtataaggagcacggcctatggctacgacatccttgcaccgcaggttggcgatgcgcgtgcgctcggtcgtgacgatagccagcgtttttgccatatcttcggttttcatgcaggcgatgtcgtgcccgtcgagaatgatttttccggaataacaccggttcagaccggctatggcgcggagcaacgtcgattttcctgtcccgtttcttccgataagggctgtcagttgacctttttttatcgtggcatttacctcgtggagcaacgagttttctttgtaacctatggaaaaatgctgtaattctatcatgcggtgatggatttgttgcgtaaaaccacccatacgacgattgggattcccaatagagctgtaatggcgttgatcggcaaggtgaatattttagaaatgatgtcgcaaagaagcaatatcgatgctcccgaaagaattgttccaggcagaaggacatgatgatcgctattttggaaaagcattcttgtgacatgaggcatagcgagacctatgaaacctatcggaccgcaaaaagcggttatcgttccggcgagcagcgttgtcgagagaaacaacaggctgcgtgaacgccgaatattcagtcccattgttacggcatattcctctccgaacagcaggaggttaagcggtttgatggtcagtacagccaacagcagtccggcaaacaccgatggaacaagaatcagaagttgtccggaggtgacgtcacccaaagcccccatcgtccaaatgacaaaggctttcagcgattcctctttgctgaggtactgcaatatctgcacgacagcacctacgcccgatgagaacatcatgcccagaatcaggattaccatgatgtcttttattcgctgtccgacggcagttatcacgagcaacacgacagccgcacccacccacgctgctccggcaatgcctattgatgaaccgatcccggcaagtaccacaagtgccacaccgagacttgcaccggaactgatgccaaggacatagggaccggcaagaggattacggaagagggtctgcatctgaagaccgctgaccgataaggcagccccggccaacagtgccactatagcttttatgaggcgtatgttgagtacgattttttccgtggcacgggaacaatttcccccggtcagtgctgcccatacatcgcggatcggaatgttgacagctcccacggccaagtccagtaaaaaaagaccgaccgtgagcgtaatcaatatggagaataatatagtcgaacgggaacgcatctatttcagttgcttgtaatacacacactcttcctgcaccagttcaggatggaatatcttcacgaggtcgcggagcacgatgtcaggattcacgacggcagactcgtaatagtcgttacccccggctgtgttggtacgggcgttgttgttatacacctctccatttttgaaacatcgggtatcggtgaatttcggacatgatgccttcaagtcgtcaagggagttcgccattcccacgttcaaccacatgtccgcatccgacgcgagcagatatgcttcttctaagtcaatggggatagaagcgtttcccgtgttcttctggtagatatagcggcctcccgcatcagtaatcaagcgggctacataactttgggttgaaggcatgaaccacgagtcgccatagggaacattaagcataaccgaaggagtgccgagggtactgtcggccactttctttttcaaggcgttgtatctgaccgggattgcggcaaaggctttttcacccttctcacgttttcctgtgacttctgaaagcactaccatccattcggccttgccgagaggcgactcttcaagataatcgccgacatacatgaacggtatgtcgagttcttcgagtttgctttccattgcgcttgcgccgttcaccccatagagcagaacgaggtcgggatcgagcgagagcagcaactcgtagttgatgttcccttcatagccgacatcgccaatactgtcgcggcgggcttggatgtctgggttggaaatgtagtcgattcccgaaacgccggttatacaccggacttcaccgattgcgtcaagcatggcgatatgagtggaagacatcgccacgatacgtttggcgtctcctttgagtacctgtcctgcaaacccttcgggaacctcttcaccgttgcggacgataaacagccatgtggttacactgtccgctccctgccagggattcctgacggttatcagtacgctttccttcccgcccgcccctttgatgtcgaagccggaggcatattcgggagcataaagcagcaggttgaaatcattgatttttgagcttttgttgtggcagcctgtaaatgccagagaaagcaacaaaatcaggcttaaattctttaatgcgttcatattgatgcagattatcgtttactatttttgttttttccgaacttgggtgttatgccgatgaatatctcgaaattgatgcccggcatgggacgggacaatacggaaaggtattcttcatcgaacaggttgttgatgctgccctttagcgacagatcggcccatcggaaagagagctgtttttccagtgtcacgttattcatgaagtaagggggcagatagcccgtcagggtatagtcattactcgacatggtataacgctggctgtaataacaccatttgtaaagcaggctccatgtccgccatgacagacgtccggtcaccgttgcggaaaactccggcacgtatggcaactgtttgccgacggattggtctgccggactcatcggttcgctctcgttgatcgagggagtccacgagaaagttccgttcatatccagtttccagtcctttccgagcattatatcaaggtgggcgttggtctctgccccgtaagcatgtacctttttgaggtttctgggggagaagaatcccttggttgtgggtagccagatgatccagtcgtcgatgtgcgaatcgaaccagttgataccaccgctcaaagcatatacattttctttccccaccgagaacgacaaccccacgtcgtatgtgaagccgtgctcgcttttcaggtcgggattaccgcccggcagaaaatagaggtcgttcagcgtgggaaaacggtagttccgggagatggatgctttcgccacgatattgccttttttcgacagtaccccgtcgatgaagaaagccgggataaccggggcccattccgtaccgaacatatcctcgcgaaggacaagcgaggcggcaaaacgatcgacaggccgccatttcgcagaaacggaaccggaaaactcgacacgtcccttgtcatacccgacaacagccttgttaccttcctgcgagatgatatttttgtccgcgctttccaccaaatgctggtgtacggaaacaccggccgtgaacagccatttctctgaaggagcataatccccgtccgcacttccgtagaacgtgttaatcttactgcgtgagcgggtcatcgaagccatttcgccgtttcccttgtcccgcttgtaatcataggccatccatgtgtgtatatagccgccttttacaccgaccttccatttctcccgcacgcgatcccacgagaggacgccgcgaaacgtctgctccctttggcggttctcgaagtccatgtcgttcccgtaatccgtgctgagcatcgccagttcccggttggaattgatataccaggcgtttagcccgaacttgtcgccttcgcccgtgttataataaatttcctgcaagacgtgcagatccttataagccccgctgcggttgcgttccgtcgggtaataggaaccgatgatgttcttgtcctcgtcatagatgttttccttcttgtcccggtttcggtatttgtagtcgttgggggaagaggaatacaccacacgggtggaggactgccagtgtttgtcaccgtaggtcaggcggagaaactcgtcgaacgtgctgaacgaccccactccctgcacgtactgcaacccgaacccttcatggttggccggagaagtggagagcctgaccagaccacccaagccgccgcccgtttcgtttaccgatgacgttccgtgcagcagcgaggcatcatcgataaagtaagaagggatggtggaaaaatccgtcatgcccagcatcgggttgttaatgcgcataccattccacgtcacttgggtatgcgagggagaggtaccccggaaagccacggtggataacgtggcgcgtccgtagttcttgacaaaaacggatgagttgaatgtcagcacatcggccatagacaaggcgatgttctctttcatggcgatggaatcgaaacgggttcgttgcacgcctatatccttcataggtcgtttgcccaccaccgtaacctccggaatacgtagtacccttttggtaatgctgacggaatttttctgctgggcggcaagcagaaagggcaggcttacccccacgaacaatagaataagatgtcttttcatttttgtcctccttcctcgttatttccagcagaaagctcccggaatgattcccacgtaaaattcatcgatcagcttgccttgcggcgaatagcgatacacgataccttgttgctggtaatcaatagcgtcggccacatatacctccccgttgttgggattgaccgtaaggccgtagtatttggtgtcccgaaactccagaaaaggccggacgggaacacggtcggcttccaccggcattcgccaaatatcgttgttgatccagtaaagtgtatcccgtgtaccgttgagctggacttccgaaggccagtcgcccagcttaaacttgaactgtttctctacggtgaaagtctcggcgtctatacgatagagagacggtgcctcgtaaccgtatgggctgccctcgtaaccgccatccgtgatggtccacatcttgttgtatttgtccatgaccagcgaagtaggttgtatgccgatggtcagttcgtccacgaccttgtccgtctccgtgtcgattttcaggatgcggttctggtacgaccagcagttcacatagacgtacttgccgtattgtaccatttgttcggtggaacccgattccatgtccatgtctggacattcgatatagccggtaatctcgtatgtcttggggttgatgatgaagatacggtagtcccatatctgcgtcacataggctttctcatccgacagaaaatggatataccggggtgaggtgaaacctgtgatacggcccacttccttgaaagtattgatgtcgatggcgaaaatcacatgcgagttgttcaccacgatccagcctataccgtcccggataaccatagactgggccacatcgcccaacttgaacccgttggcacggtaaaacacttcattctccacttcgcacgtggcgggatcgtagtaggaaagcgtggcattgctgtactggaaattcccctcgttggtaatgaaaagaccagaggccgatacagagaaatcttccatctctccgtaatcccatttcatgcaactgccgaaaactggcaggcagaaaagaaaaaggcaaatccgttgtattgttctgctcattgtcattcggataaaaaagagtacccgaatcattacgggtactctggttaaggtataaggtttaatcctgctgcgtatattgtttgtccttcatattttggaaggttgggttatacccacatttcgtcacgctccaactttcccccgtaatcattccgttttctataaacttgccgaagaaagtgtagtcggtaaatttcgtcaaaccgtcaaaaacaaccccatgcaaggtctccaacttctccatggaaagtgtttcctgagaaagagaagtcgcactttttatctgtagcgtaccatctatagtctgtaatttatcacaagtaatgcctgttgctttattaacgaacaacccttcacctcctacgtgaagcaattccggaatatccagcgatttactttgtaaagatattgctaacgaaccctctccctctttataatatacaggagaagctgaacaacaaactttggatagtaagggcaagttacaactggtaaaatttccagataaatagaactgtcctcccacttctttcaagactggcattgtgattgaagcaaacatgggtatttggatatatccatatccatctatgatttccaagtcgggaaatttggcattgcttcgcatttggcctgtcacatttagatttccatatacatgttgaattgtcgatatggtataatcggtattgttggtggttggcttacaagtgaagtctttgatattcttgaacgtgatttcagggaacttattattcgtgagactggtgatgacaaaatttacatttgacaaatcttcggctgtttcaattttggagagctgcaccttgtttataatttcaatctggggcgctgtttctccgaaggtttcaaatcgggcgttcggcaacagcagtgttccgctcacatcttcaagataatccagcgtgatgcttccaagtgtggtgatcttgctccagtcgggaagttgtttgagtgccgtgaaattctttatctttatctgtccctttatcgttgtcagtttgtccattccaccgaaagcctgaagcacgtcatttcgttggggaacaaaactaccggtaggaggagcttccatattggcttccataataatacttccgtttactgtttcgatttccggaaggttgatggtttccaacatcacggggacggtatggaaatcaaggccaccggtctctttcagcttaaggaagctcatggaagtcagcttggcaagattgtttacggacaagacccctccgacacttgtcagttccggtatttccaaagacgcaatcgaaccggctgctgtgttctcttcattgagtccttgaagattcagatcctgacctacagtagtcagaaccggaaactcaaaactctgtaacgacgacgcattgaacatcacgcttccttcaatagttgccagtttctcgaataggacatacgtcacttggtcgttatataccgatatgtctccggagagcgtttccaatgctttcatggaaatcatgtgaagttccgtagctttcgaggcgacatcggtcgaacctacctgtaaacctccggcagaaacgatattatccaaccctgtcaagtctgcaccgttgtaactgttacgaatgacaatgttgccagtaacctctttcaaagatgccaatgcagatatgtcagtgattttttctgcctcttccgcatcagagccgataatcaggttccctttgacaacggttgttttggttgcggcaaaagaagctacctcctcggtggtcttcaactccacatctccgtcagattctatctcgcttttcacgaccttataggtatattcgcgggcatctccgttataggatgtcacccggaaggttcgttcgttatcccagtccgttaccgtttcaggatcaggtatgattgttgcagaagttgtgtacttgaattccacttcggcgttgttcagcgataccgtatagggaacggttattgttactgtattgtccgtaatgtcggccgtgtacgatttcccgtccacggtcatcacgaccgatgtgatgaaattttcatctgcatcttcaggtataatttcatcgtttttgtcacacgctcccaaaaagaacaaggataggagcatgggaagaaaataaattttcatacttgtaatttttattatttggttagatcctcaaaagaaaatacctccgtagaaacttcgcccagccagccgcttttggccagaacaccgcattgtattttgataaagtcaatatattgcagattggcttccgttccatcggcatggatggcattggaaattttgaaaccgttcctttgtccgcttccatccaccgtactgccgccttctatctggtcgtttccgaaattatccacgtacccccagtcataactctgattatcccaataaccggtttgagaatcttgggtgttgcgggcggccagacaagtgcctgtcagggtataactgttttccgaaatccaagccggataataatagtcttgtgtatgataagcggacagatagtctacccagccgtttctaccgtcggaactgatccattggacatccatttttttgccttccggacggtaataggtcacttcaaaattctgtattgtttcttccttgcctgcttcagatcctttcagttcgtaccactcgtcatccggcaatccgtttccgtttatatcttgcatgacccatacgatacccggttcggaactgccgtcaaaggcgttcccctgaacacagaaatcatattggttacccgaattgggaatactgtggtcgaagccgacgatgatataacccccgaaagaacctaaagagacgtgcagtttgtctttcaaacgctgtgttgcccatgcgacagccgcttcaggggatgtttcgttgccggtcataccgcctatcgtgctcgtctcgttgataaattggccgggagctggggtatattcatagactttattccagagcttggaacttcccgaagcccggaagccgtcttgttcctttttgtccacacaaacgacttttacggtggcagtgacagccgttttccctttgtcgatattcctgcttattttttccgtcggtgtgtcttccgacacagtacaggagacggtgtattctccgggtgcggacggcgtgaacttgaacatgcgttccacttctccttccatgacctgaccgtccacactccactcaaaacggggattgtcgaaatactccaacaacggacgcaggaaaacaggacggtcggcaaaagtgtacctgtccgtggatgtttgcaggtaagacggggtcgggaatttgacaacgtagggcatcgtttccacgacctctacgcttacgtctttcgttgttgtcccatctatattggaagcgttgattgtcaccgtataaacaccgagttctttttcattgaaagtataagtattctcggtggaaacgatttttccttcccgtacccattcgattttgaacccttcgacatccgaatgctgaatatcgggagtaaatgtgtaatcggtattccggacgacttttagcccctgcgaaggtagtgccagtgagatgaccggaggggtgagttctttcacttctactttcagttcctcttcggcatagccttccgcattgtctactcttagtttgacataaaaatccccgcattcattccatgtacgttgaagagacggacccgaagaaaccagcgtaccgtctatcgtccaagcaaaaagagcatcttcaacattctggtatgtcggggcgatagtcaattcgtgatcgaccttgaccgtgtaaataccggtctcgctgtcaagttctattataggttgtcctcctacttcttcggtaatgacttcatccttgttgcaggaggtgaacagcatacaggcagaaataataaaatagtgaaaacgatgcatgatgtgtggattttagaaaaataacagggatacccccgacagaagggatatccttgtattctttttattgtatggtgatatcatcaatacagatataagccggagtattcaaaccgtatgctcccgaatccgaaccctcgaagttgaatttcacactttgcaccccttcggcattgatttcccaataatcccatgtcgtgataggatcaacctgttgttggccgttacgataatcggctaaaagacgtttgtaagtgcggatcagaccgccattcgcatcataacattccagattcacttggaaataccctttcatctctttcagaggagtcgctacccccgtagaaccgaactgattaccataagtaatgacaccataagtgtatgaggtgttgcagatccacaggccgaccaatttccggggaacattgaaataaaattctggtttagccatccatgcctgattgtaagcatccacatatccgtaaacgacaccgaaattggaaccgctgtgcccggcttccttattctgtccttccgcttccaccgcagtgttatagacagaacattggtttagataagaataccaccagtctccggtatttcccgactgattggagcggatgttccagttggaaagtgcgatgccgccgctggaatactctgtgcttccacctacagtattaaacattgaaaggaagagatattcttccggagtattgtcgtaaatggtggttacttgaggatacccttggtacgaataaagattttctccggccgaggtaggtcctgctaacatgccgggatcgaaatcatcgaaagtgatagttaaagtaccgtccgaatttgtcacagcacgggtttgcgaagttccggaatcaaccgggtccatcaaaaagtcatcgtccgagctacagccagagaacaaggcggttgcggtaaatagacaggcacctgccagaaagcgtaattttcttttcataggtcactcattttaatgtaaaacatattattaacaaacacaaaaaattcccgttcgtgcggacttacacgaacgggaatatgtctgtcttcaaatattgaatggccgatgagctattccctatttgattacgacccgtatatcccgcaggtgtaaatctcattccggtcatggcaggtcttctgactcgtcccggtcatcgtgccttcccggtattacaccagtggcaaaagttcgatgtccgtttttgtggactcacagcagcgggtactgtcccggattttcaccgggttcccttttcattcggaaggcgtaaacctcccgaaaccatttcccgactgcaaaattatctatattacatatcaattccaaataattcataatatttataataaaacacacaaagcatgacaaccgtactgttttaattagagcattcaagtttacgacaaacgaagacggtaattatcatacacaatatccataaaccaacaaaacagcttgccattttccataacaatgcgttctggaatagataactgttagctgcaattatgcaagcaaaaaaagcagacagaataatgactattaatatcatgcaccagaaattaatcctataaatttatggaaaacaagtaagggaatggaagttccgttgccgcatggatgcaggtgaaggaccttctcttttaacgttggatacgccaatgcacgccaacggaagactctgatattatctgtttggaaaggatataggatgtgcgttactttgtcgcatattcagaatcttaaaaagaattttagtatggaactgacaattattgaaacaagcgcgtattaggagttgagaaagctggtcagcacgctggtcgtacagatgggcgacttccagaaaaagattgccccgcctgcgccggacaagtgaatggatgcgcaggacgtatgtgatggacttatgcccaaacactttctgaagagtttccagcagcatccccttgagtatggccagaacggcaaatgcgtggcgtccgatgtgcggggtgacctcgccccggagttgcatttcctgcctatgattccaagactgagccgcatggcattgtattcacctaccggaaagacacattcggggagtctttcttttcatccgtacccctatatttttcaatcagttcgatagcaatgggcaataattttacgacatacgccactcccgtttttatacggttgcccatcagccatgtaccgccgtcggagtcggtatggatattatcgtatgttatggctttcaagtccacataggaaagaccggtgaagcacatgaacaggaacatgtcgcgcatggcacgctggcgtttgtatctcggttctatatggattatcctttgcagttcctcttcggaaaggaaagaacgcctcttgtattcgggcatacactcgaatgatgcgaacggatgaacccgtatccagcctttttcctgcgcgatatacatcagccacttcaaggtattgacacgcccgaagacagtggagtttgccaaagcgcatgtaccgagcatccagttgtagtaatcctcgatgaatgatttctcaagttcttcgatgacaatatcctctgcattcttcttgcttttcatgaaaagcaggagactcttgtaatcggcaaccagaccgcagtaggtgctttcggctttctctatgccgattttctttttatacggttccagctgttccctgaaaaggttcataagggtgtggcattcctctgagaagccgacatagcggttatagactttcttggctgtaacaaaactgtcgtggtcgcagatgtactggtagtgcctggtgatttgcgccttgatattgtcaagctcctgattgagtgtacgggcctcctcggacttgcctttggcccggttggttttgacgtcccacaaagcgagggacacttctttcttacaactgaaaccggcttgggttccattgatggtgatacggcccataatcggtgtctttccgttttttacagactgtttattctcaaaacacttagctatacatggtctgcgataagctaagagagattccccttacacaaaagcatggcatctccttgtcgtatctcgcctttatacttttatgtatagtagtctaccggatcgaatgaacaagacctatcccatacataaaccaatttagactgctatgttatttttgaggaagaagatggaatgagaccagataccctctttaaggctgactgtaagtcgattaaatgtagaaaaagattgcttttgtcacaagtaaagtgtatatttgcattgaaagaatcgttctttgacagaggcaaaagaaaacagaatattgtaattcgctcgtttctaaatcgttacctgatattaattaaacagaaataactgtttaattttcaattagatagagattgtatgatgtttcgccatatgaaacgtgatgttcttatctactcccgcttgcttggccacctttttcaagtatctgttcatcacctgattgagtggcacggggaatatatgattgttccgttttccttcgtgatatgcctcatacctttttaatatattaacggcaggttgcaataaaggcagtattgcgtgtatgtcagttttttgccgatagtagctaagccacaggcttttgtctatgccgacattaatattttcattggtaaggttccctatatcgacataggacaggcctgtatatacagcaaaaatgaagacatctctcacgatagacaggttggcgggcaaagggacctcctcaaggcttttcagttccttttcggagaggaatcccctttccacttttgttttcttggcattgagcaggcaaacagggtttcggcttatccattcgttttgcaaggctacattcatcacctttttgaaacgctggatatgctttaatgcaccattgactgcgcatacggtatccccttccctcctatacccttgaagataggcgtaaaattcataaacgaatgctttgtcaacagcagccaggtcataatcggaaacgtggtatttaatgcgtatgaaattgagcagatgtttcttcgtgacgtgatagccaataaatgtactggtacggagattctttttctccatgatttcatggtagtcgaacagtgtgctgatcgtagagaactcattatcctgtgtctggaacatgagtttgaaattctcaatgttcaagggatagcttttctgcctgattttggcaatggtatcctcaatcgtgatcttcaaatcttcgatataccgattgacttctttatcattggcggttttcccgagcgacttttgcgcaaccgccgaccatgattctgagcgtagatgtagtttcgtgggaatttcgtatctttgccctgagatcgtaacccgacatgagagaggtgacatcttttcattcgttcttcctttccttatccagaaaagaacattgaaagtttgctttttttggttcatcgttgttttttttgagaatcactcaaaaaaatatcaaaaaagagcaatcgtgtcaccgaatttgtcaccgaattagcgtcaacttttttcgggtggcatttgtcaaagcatgaaaaaacccgctaaaattgcagttttagcgggtttttgtcattaaaaagctggtggtttgttgggctacctggattcgaaccaggaatgacaggaccagaatctgtagtgttaccattacaccatagcccaatgattttcgtttgcgggtgcaaagatacaaataatttgggaattgcaaacatttctgctattttttttgcaaaaactctcattttgctccttcaagtagaagcatctcccctaaaaaacacaaaaattaagtcataactttcttgtatccaataaatcaccgtatatttgtcaaaaatatcacgtttataatcagaaacaaaggggaatccttttttgttataaaccaaaagagaacatgaattattaatttcaattacaggaatgaacgatacgaaaatattaattgaaaaaattaaagagggaattcaggaaaaaaaaggtaaaaacatcattattgctgatttaaccagtatagaagataccatctgcaaatatttcgttatatgccaggggaactcccctagtcaggtaaatgctattgtagactctgtcaaggagtttgcccgtgaaggtgcagacagcaaaccgaccgcaatcgacggacttcgaaatgcagaatgggtggcaatggattattccgatgtacttgtacatgtctttctgccggaagtaagatccttctataatcttgaacatctgtgggctgacgccaaacttactcaaatccccgatttagactaatccacaattatggacaacaataatactaacaacaataacaataagcctaataataaggtgaatatgcccaagttcaatctgaactggctatatatgattattgccctcatgcttctcggcctttggtggagcagcgattcaagaggaagcggaagtaaagtcgttccttacagcgacttccagaagtatgtcactaacggctacatcagcaaagtactgggctctgagaaaactctcgaagctcatgtcaaaccgaatgccgtaggtgcaatattcggtgcggactccaccaaagtaggaagaaacccaattattaccagtaaccctccttctaaggacaggctggataaatttctgcaggacgaaaaagcagccggtcattttgacggaatagcagattaccctgccgattcggatattttcccggcaatcctgattaatattcttccgctggttttattaatcgccctgtggatattcttcatgcgtcgtatgagcggcggtggcggcggtggtgccggcggtgtattcaatgtaggaaaatccaaagcccagcttttcgaaaagggaggctccatcaagattacattcaaggacgtagccggcctggcggaagccaaacaggaggtagaagaaatcgtagagtttctgaaagaacctcagaagtatactgacctaggaggtaagattcccaaaggcgcattgctcgtaggccctccgggaaccggtaagacattgcttgcgaaggctgttgccggtgaagcaaacgttccgttcttctcactggcaggttctgacttcgtagaaatgtttgtcggtgtaggtgcttcccgcgtacgtgacctgttcaagcaagctaaagaaaaagctccttgtattgtctttatcgacgaaattgacgcggtaggccgtgctcgtggcaaaaaccctgcaatgggtggaaatgatgagcgtgaaaacaccctgaatcagttgctgactgaaatggacggcttcggctccaacagtggtgtgattatccttgccgctaccaaccgtgtggacgtacttgacaaggcattgcttcgtgccggacgtttcgaccgtcagatacacgtagacctgcccgaccttaacgaacgtaaagaagtattcggcgtacacctgcgtccgatcaagatagacgatacagtagatgtagatttgctagcacgtcagactccgggattctccggtgcggacattgcgaatgtctgcaatgaagctgccttgatcgcagcccgtcacggaaagaaatttgtaggcaagcaggattttctggatgcggtagaccgtatcatcggtggtctggaaaagaagaccaagattaccacagaagcggaaagacgctcgattgccttgcatgaagcaggacacgcctctatctcgtggttgctggaatatgcaaatccattgatcaaggtaacgattgttccccgcggacgtgcattgggtgctgcctggtatctgccggaagaacgtcagatcactaccaaagagcaaatgcttgacgaaatgtgcgctaccctcggaggacgtgcagccgaagacctgtttatcgggcgcatctctaccggtgctatgaacgacctcgaaagagttacgaaacaagcatacggcatgattgcttatttaggtatgagtgacaaactacccaacttatgctattataataatgaggaatattctttcaaccgcccgtatagcgaaaagacagccgaactcatcgatgaagaagtgaaacggatggtgaacgagcaatatgaacgtgccaagaagattttgtccgaacatatggaaggacacaatgaactggctcagttactgatcgacaaagaagtgatctttgccgaagacgttgaacgtattttcggtaaacgcccgtgggcatcccgctcggaagaaatcatggctgccaaagaaagccaggatgctgccagagcggaaagagaacttgccgagaaactgaaagcagaagaacaagaaatcaaagaagaggaagctaaaaattctgctcaggaagaagcaactacagaaacgaaaatcactgcggaaggaaaaaaagtaaccgtagaaggaaaagttactatagaagcaaaatccaatgagaaagaacaaactaccgaatctaaataattaaaacacgaagattttgattagtaattttataaaacgggccattacgggtatactctttgtcgccattctggtgggatgtatactctataattctttcagcttcggcattctgttcatggcgatcagtgcactgacgatctatgaattcggacagttaatcaacagccgtgcagaaggagtcaacgtaaacaaaaccattatcatgctgggaggagcttacctgttcctcgcagtgatgggattctgtatcgacgcagccgactccaagattttcattccttatttgctgttgctgctctatttgatgatcagcgaattgtatctgaaaaaggcaagttcaatgcttaactgggcatattccatgctcagccagctttatataggcctgccgtttgccttgcttaatgtcttggcgtttcatactgatccggaatatagcagcgtaagctacaatccgattctgccattgtccatctttatattcctttggctgagtgatacaggtgcatattgcgtcggttcattaattggcaaacaccgcttgtttgaacgtatctctcctaaaaaatcatgggaaggttccatcggcggcggagtagtagctatcggagcttcttttgtcttggcacattacttcacgattatgtcgatgtgggaatgggcaggtctcgctttagtcgttgtcgttttcggaacatggggcgacctgacagaatcattactgaaacgccagctgcacgttaaagattcagggaccattcttccgggacacggagggatgctcgaccgtttcgacagtgctttgatggctataccggcagcagtcttttatctgtatgcactaacttggttttaataacagaataaataaaataaaaggtcggaagccgctttgaagcacttccgacctttttttttcacacacagtgttcgtcaaggtttaggtttagttatttataaaagttttgctatttaacaaaagaagtagaatgcacatctttcgctttttccggaacgcctaccggatgatccaaatcaagaacgatcactcttccttctccattttcttttgaattaatagtcaccttaaatcctttaaattctgtttcagctgcatcttttgccgttggatagaactcttccagattataagaaactcgtccccatccccggtatccagttacatcatcatacgtattgtaacgtaattccagatgtatatacccatcttcatccacattcaaagcttccggtgtttccggagcttccggttctatcttattctgtacaagactgatgcggtgcttttcagaacgaggcaaatactgatggaagatgatattcaaaaactttcctcccagccacatatctccttgataaatcacgataggatcattaccgaattcctcttcattttcagccgtcatatcttccacctcttttgtcaacacttcctgaattccttcaatctttacctgagcacccttatccgtatcagccaaaggattgaaaaaagcaactactcgttcaccgtctaccggtttgtaccaaggaatagaactggccaccggatcaatcataccccaacgatcaccttccagataataaccaccgccaccggtagcacgaactgtagcccaatcccatcctatgtctccaattgagtacccatcgtcgtcacatgattgcagcgcaggtaccaatgcgagcaataacattactaaaagccaattaaattttttcatatttattcctctctttttaattcttctgctatataaataaaaaagccgggcatttactgcaccggctttacgtttattcagaaaaagaaagttattttttcaacagttcaagcattttgcgagcagcatgctggggagcacctgcaggccccaaccgatctgccatatactcatattcggcaagcatacgatccttatattcctgatcttcaatcagtttctttagttcactctgcatatttccgactgtcattgtatctgcaaccaactcctttacaacctcacgatttgcaatcagattgactagtgagataaatttcactttcaagatatgacgacgcaaaaacgaaaccacttttccaatcggtgtatagtaacaaaccacctgaggaacacggaacaaggctgtctcaagagtcgccgtacccgaagtgaccaaagccgcctccgcatgttgtagcaaacgataggtctggtcaaagattattttcactttagcctgccctacatattgtttgtaatactccggagcgatgccgggagcaccggccagtaccagttgataatcgggaaaagcagaagcagctttcagcatatccggcagattatccttgatctcctgtttccggcttcccgccaacagtgcgattaccggtttatcctccagattattatccgccaagaatgcttccggatttttaggatgagctttctgataagcagccacttcatctaccgtaggatttcctacataatgtataggataccggtgcttctcttcaaaaaactccacttcaaaaggaagaatggagaaaagttcatccacatcacgtttgatattctttatgcggtactccttccatgcccatatcttcggagaaatataatagaagacaggaatctgcgtctcgaaatgcacaaacttagctatgttaagattgaaaccgggataatcgaccaagatcaccacatcgggattccacgccacaatatcttccttgcaacgtttcatatttgcaaaaatcgtacgcaaatgaagcagtactggaataaatcccatatacgccagctctttataatgcttcaccatcgttcctccgacggcagccatcaaatctccaccgaaaaagcggaaatcggcctgaggatcttccgccttgagggcagtcatcaaatgggacgcatgcaagtctccggaagcttcaccgacaatcagatagtacttcatgggaattttgaattaggagttttgatatttgaaatcagcacaatgcgtatgtcagaattccagttgctgacaatagccattcagttcatctataaagccgtaagcagtcatatcgactgtcgttggcgtgatagccacatatccgttttccagcgcccaatgatcattgttctcattttcaagttcatgatcggtgaatgaaccggtcagccagaagtaattatggtcatcgagacggggacaagttacccattcattcacccagcatccctttgcttgttcacaaaccttcactcctttgaggtcgggagtatcgggaaagttcacattaagacaagtcaacgggggcagtcctttttccaatatcatggcagctatcttgcgtatataaggacccgaaggttcaaaatcagcatcgggctgatgattgcacagagaaaaaccaatcgaaggaattcccttcagacagccttcaatcactactcccatcgttcccgaataatgcacgttaatagcggaattatctccatgattgataccgcctacgatcaggtcaggcttccggtcgagcactgagcccaatgccagcttgatacaatcggtcggcgttcctgtacatttatatacagtcagtcccacttctcttttgaccagttgataatgaaccggatgagtcaccgtcaatgcactgccgctgccggagcgcggagagtcgggtgccattacaacaatttcccccaacggacgaaggaacttcaccaattcactaatacctttagccataacaccatcgtcattcgaaacgaggatcaacggcttcttactttccatatattcaatcctttcctttttaatgttcgcacaaaagtagcaaaaagtaaccgtactgccaaccgcttatctccgaatatcacattaatcacatcgctatctgacgaatatacacccgtttacaaatcttaatcttctgcaagcgagtaaaaaaagaaatagatatccaatataaatatgtatatttgcaagctcgaacagagaaagtatgatgataaaatcaaccgggtttcggaactgtttcgtccggcagttattaacaaaaccggtgacttatcaacagaaaatgcaaagtttctcttttttcgtaggcgctctaaggaattatcacttatttcgctgccaataaatttagagtatatgggaaaaataattgctttggccaatcaaaaagggggtgtaggaaagaccacgactacgattaatctcgcagcgtcacttgctacacttgaaaagaaagtactcgtggtagatgccgacccgcaagcaaatgcctcttccggtctgggagtggacatcaagcagtcggaatgcactatctatgaatgcattattgacagagccaatgtacaggacgctattcttgacacagaaatcgactctttgaaagtgatctcttcgcacatcaatcttgtaggagcagagattgaaatgctgaacctcccaaaccgcgaaaagatactgaaagaagtgctcacacccttgaagaaagaatatgactatattctgatagattgttctccttcactcggactgatcaccatcaatgccctgacggcagccgactccgtgatcatccccgtgcaagctgagtattttgctctcgaaggcatcagcaaactgctgaatacaattaaaatcatcaagtcgaaactgaatcccgctctggaaatcgaaggtttcctgctgacgatgtatgactcacgtctgcgtcaggcaaaccagatttacgacgaagtgaaaagacactttcaggaattagttttcaacagtgtgatccagcgaaatgtgaaactgagcgaggctcccagctacggtatcccgaccattctttatgatgcggactctaccggtgccaaaaaccatctcgcccttgccaaagagattatcaacagaaataaataaccgaagaagatatggcaacacaaaaaagaaatgcattaggacgcggacttgacgccttgctctcaatggatgatgtgaaaaccgaaggttcttcttccattagtgaaatagagttggcgaagattaccgtcaaccccaatcagccccgccgcgaattcgatcaaacggctttgcaggaactggctgactccattgcggaaatcggtatcatacagcctatcactctacgcaaactctcggacgatgagtatcagatcatcgcgggagagcgtcgttaccgtgcttcacaaaaagcaggactgaaaaccatccctgcctacatccgcaccgccgacgacgaaaacatgatggaaatggcgctgattgaaaacatacagcgtgaagacctgaatgcggtagaaatagcattggcttatcaacatctgctggaccagtatgaactgacacaggaacgcctgagcgaacgtatcggcaagaaccggactactatcgccaactacctgcgtctgctgaaactgccggctcctatacagatggctctgcaaaacaaacagctggatatgggacatgcacgtgcattgatttcattaggcgaccccaaacttcaagtaaaaatattcgaagagatacaggaacacggatactccgtccgcaaagtagaagagattgtcaaatcgctgagcgaaggagaagctgtgaaaagcggcacacggaaaatcactccgaaacgcagtaaactaccggaagagtttaatttactaaagcaacaactcacgggatttttcaacaccaaggtacaactgacttgctccgaaaaggggaaaggaaaaatcagtattcctttcagcaacgaggaggaactggaacgtatcatggaaatcttcgatacgctaaaaaagtagatgacaagaaaaagtaagaaatatcagttactcatcatcaccctgcttctctgttttctacaggtggcagggattgatgtgtatgcacaagaacctgtgactccggtacagaaagacagtattattcagagccgggaagcaccgaaagcacgtgcacgaaggcaccgggatcctgctcaggtgatggattcgctgaagaaggattcgatcaagatattgcatccggaacgcctgcaagcaaccgacagtctgtctgctgccaaaatacagatagccgacagccttgacgcagccaataaaaaagaactgaagaagatagaacagccgacacctattgtagtgaaaaccgacacagtacctcctgtgcagaatctcaacaagaaactgttcattcctaacccaaccaaagcgacatggcttgcagtcgtattccccggcggaggacagatttacaaccgtaaatactggaaactacctattatatatggagggtttgcaggatgtgcgtatgccctcagctggaacgggaaaatgtataaagactattcacaggcctatctggacatcatggacagtaatccaaacaccaagagctatgaagatttgctgccaccgaacgcccagtataatgaagagcaactgaaaaacaccttgaaacgaagaaaggactcgttccgtcgttttcgggaccttagtatatttgcatttatcggagtataccttatttccatcatcgatgcctatgtcgatgcggaattatcaaacttcgacatttcacctgacttgagtatgaagctggagccaactgtcattgacaataacagccagtttcgctccaacagttacaagaataagtcagtgggactgcaatgcgtactacgattttaaaaacacaatttagattgaacttataattaaagcatgaagaaattagaaaactattgttcgattattttccttttcctgttggcaaccacacaggtaaaagctcaaagtgtagatgtagttattcgtgaaaacggaaccgaacgcaaagaaagcatcgatcttccaaagagtatgacttacccgctcgacagtctgctgaacgactggaaagctaaaaactatattgatttaggcaaagattgcagtacggcggaagtgaatcctttattcagtgattctgtctacattgaccgcctttcacgtattccggctgtcatggagatgccttataatgacattgtacgcaaattcatcgatatgtacgcgggtcgcctgcgcaatcaggtttcattcatgctgagcgcctgcaatttctatatgcctatttttgaagaagcactggacgcttacggacttcctctggaactgaagtacctgccgattatcgaatccgcactgaatccttcggctgtgtcacgtgccggcgcctcgggactgtggcaattcatgattgggacaggaaagatttacggtcttgaatccaatagtctgatagatgaacgccgcgacccgatcaaagcaacctgggctgccgcccgttatctgaaagagatgtacgatatttatggagactggaatctggttatcgcagcctataactgcggcccaggtactatcaacaaggcaatccgccgcgccggaggcgaaacggattactggaaaatctataacctgctgcccaaagagacacgcggatacgtacctgctttcattgcagccaactacgtgatgacatattattgcgaccacaacatctgtccgatggaaacaaacattccggcaagcacagatacggtgcaagtcactaaaaacctgcatttcgagcagattgccgaactttgcaatgttccgctggaggaagtgaagagcctgaatccccaatacaagaaacaagtgattcccggcacgaccaaaccttgtacattacgtttaccacaaggcgccatcagtacgtttattgacaagcaagatacgatctacgcacaccgtgctgacgagctattccgcaaccgcaaaaccgttgccgtgaaagaagtaactccaaccacccgcagacagacaagtgcagtggccggtaaaggaaaattgacttattataagataaaaagtggagacactctttcatcgattgccgaaaagctaggcgtacgtgtcaaagatatacagcagtggaacggtatgtcgaacaccagaatcgcagcaggaaaacaattgaaaatctacaaataaatgacttcccgcttgcttcattcggaaatttgcttatttttgcaaaaataagcgaatgaaaggataacgaatatggataatataacccccaaagaaatagcagatgaagagatgatcaatcaggcgttccaggaacttctgaatgattatctccatactaaacatcgcaaacgagttgaaatcatcacaaaagctttcaacttcgctaatcaggcacacaaaggaatcaaacgccgatctggcgaaccttatatcatgcacccgattgccgttgcacaaatagtatgtaacgaaattggtcttggttctacttctatctgtgcggcactactgcacgacgtagtagaagacactgattacacggtagaagacatcgaaaatatctttggaccgaagattgcccagattgtagacggactaaccaaaatctccggaggaatcttcggcgaccgcgcttcggcacaggcagagaacttcaagaagttactgctcaccatgtcgaacgatatccgggttatcctgatcaaaatagccgaccgcttgcacaatatgcgcacgctgggttccatgctgcccaacaagcaatacaagatagcaggagaaactctctacatctatgccccgttagccaaccgcctaggtctgtacaagatcaaaacagagcttgaaaacctcagcttcaaatatgaacaccccgaagaatatgccgaaatagaagaaaagctgaatgctaccgccgccgaacgcgacaaagtattcaacgacttcacagctccgatccgcactcagctggataagatggggctgaaataccggattctggcacgtgtgaaatcgatctactccatctggaacaagatgcaaaccaagcacgtcccgttcgaggagatttatgacttgctcgctgtccgtatcatcttcgaaccacgcaacgtggaagaagaactcaacgactgtttcgacatctatgtctccatttccaagatatacaagcctcatcccgaccgcctgcgcgactgggtaagccatccgaaggcgaatggttaccaggcattgcacgtcaccctgatgggaaacaacggacaatggatcgaagtacagattcgcagcgaacggatgaacgatgttgcagaacaaggctttgccgcccactggaaatataaagaaggaggaggcagcgaagacgaaggtgaactggagaaatggctgaaaaccattaaagagatactggatgatccgcaaccggatgcgatagattttctggatacgatcaaactgaacctgtttgcttccgaaatctttgtgttcactccgaagggagagttaaagacaatgccgcagaactctacggcgctggattttgccttctcactgcacacagatatcggtagccattgtatcggcgccaaagtcaatcataaactagtgccgctaagccataaactgcaaagtggtgatcaggttgaaatattaacttcaaaatcccaacgtgtacaaccgcaatgggaggtattcgcaacgaccgcccgtgcccgtgccaagatcgcagcgattcttcgcaaagaacggaaagcgaatcagaaaattggcgaagagctactcagtgagtttctgaagaaggaagaaatacgtccggaagaagttgtcatcgagaagttgcgtaagtttcacaactttaagaatgaagaagagttactggccgctatcggcagcaaagccattactttgggagaagcggacaagaacgagctgagagaaaagcaaaccagcaactggaagaaatacctgacgttctccttcgggaacagcaacaaggaaaaaccggaagagaaagaaccgcaggaaaaagaaaagatcaatccgaaagagattcttaaactgaccgaagaaagcctgcaaaagaaatacatcatggccgaatgttgtcatccgattcccggtgatgatgttttgggttacgttgatgaaaacgaccgcattattattcataaacgccagtgccctgttgctgccaagctgaaaagcagctatggtaaccgtatattagcgaccgaatgggatactcacaaagaactttctttcctcgtatatatctatttaagaggtatagacagcatgggacttctgaatgaagtgactcaggtcatttccagacagctcaacgtgaacatccgtaaacttgccattgaaacgaatgacgggatattcgaaggaaagattcagctatgggtacacgatgtggaagatgtaaagacaatctgtaataatctgaagaagattcaaaacatcaaacaggtgaaccgggtggaggaataatttatcgtccgtccagttctttcttgatagccagaagctcttccttaatacctttcagacggttcacaatttcgtaattgcgaaccgtggcttccttattatccttcaaccgttgacgggcaccgggaagcgtcagacctttctccttcaccagatgatagatcagaccaatcgtttccacatcctcctttcgatactgacgtatccccctccccgttgtcctgggagaaatctgcgggaactccttctcccaaaaacgaagcaaggatgcattgactccaaacatatcggccacttcggctatggagtaatataattttagttctttgtccgtattcagcatagaaatcgttgttttaagagattaatcgaacactttaccgtgattggcggctagttgaatcatcttctcataatcttccgcactcaagtccatgaagtaatagttgacaggattcacaacctttcccttcacgtgtacctcatagtgaagatgaggaccggtgctcttacctgtacttcccacttttccaatcacctcgccacgcaccacctttttcccaactttcgtgttatagctctgtaagtgagcgtaccgagtcagataaccgaagccatgatcaatctcaatcgtattgccatatccggtttcccatcctacttttaccactgtaccgtcaccggtcgcatagacatccgttcccggatgagcggagaagtccattcccgaatgaaacttcgtcgtaccgtaaatcggatcaatacgtgttccgtatccggaagcagtcttgcgaaggtctttattggagataggctggatagccggaatacatttcagcatttcatcatgattcttacacatatccaccacgtcatcgaaagatttggactggatataaagttgtttggacagtacatccagcttttgggtcgtatttaccaccagcttggagtttgccagatccatcagctcctcataccggttcgtacctccaaaacctgcctgacggatagccggcgaaacaggatcagcttgcagaatcacccgatacaggttatcgtcacgctgctgaatatcctgcagcacccccatcgcatcatccagacggcgggaaagtacattatattgcgccaaaagacggctattttcgattcgcagctccttctccgaaggcgatccgaacaccagaagcaagacgatgaagcatccggctccaagtcccataccgataaaaagccggcgcagaatgctaagcgcacgctgccgtacggtagggtaaattcggtcataagtctgcgtccttggattgtagatgtagtaaactttgcgcatctttttggaaatatttcgcttgttaatacggcaaaagtaataaaaacaagctatctttgcacagttttttgagaatattaacctcaacaatagatatatagaagaatatgttgactgcaaaagagatcagagattcattcaagaatttctttgagtcgaaaggacaccacattgttccctcggctccgatggtgataaaagatgaccctaccctgatgtttaccaacgcagggatgaaccagtttaaagatattattttgggtaaccacccggccaaataccacagagtcgcggactctcagaaatgtctgcgtgtaagcggaaagcataatgacctggaagaagtgggacacgacacgtaccaccacaccatgttcgaaatgctgggcaactggtcattcggtgactatttcaagaaagaagccatcaactgggcatgggaatatctggtagaagtattgaaactgaatccggaacacctgtacgccaccgtattcgaaggaagccccgaagaaggactgagtcgtgacgacgaagccgcttcttactgggaacagtatctgccgaaagatcacatcatcaacggcaacaagcacgacaacttctgggaaatgggtgatacaggtccttgcggaccttgttcggaaatccacatcgacctccgtccggcagaagaacgtgccaaaatctccggccgtgatctcgtcaaccacgatcatccccaagtaattgaaatatggaaccttgtgttcatgcaatataaccgtaaagctgacggcagcctcgaaccacttcctgcaaaggttatcgatacaggtatgggattcgaacgcctctgtatggctttgcagggcaagacttccaactacgatacagacgtattccagccgatgctgaaagcgattgcagcaatgtcaggcacagagtacggaaaagacaagcagcaggacatcgccatgcgtgtaatcgctgaccacatccgtacgattgctttctccattacggacggtcagctgccttccaatgccaaggcaggttatgtaatccgccgtatcctccgccgcgccgttcgctacggatatactttcctcggacagaaacagtcattcatgtacaagctgcttccggtgttgatcgacaacatgggagacgcttatccggaactgatcgcacagaaaggtctgatcgaaaaagtaatcaaggaagaagaagaagccttccttcgcacgctggaaacaggcatccgtctgctggataaaacaatggaagatacaaaggccgccggaaagacagaaatcagcggtaaagatgcctttaccttatatgatactttcggttttccgttagacctgacagaactgattcttcgcgaaaatggaatgacagtcaacatcgaagagttcaacgcggaaatgcaacagcagaaacagcgtgcacgtaacgctgccgccatcgaaaccggtgactgggtgactctgagagaaggaacaaccgaattcgtaggttacgactatactgaatacgaagcatctattctccgctatcgtcagatcaagcagaaaaaccagacactgtatcagatcgtacttgactgtactccgttctatgcagaaagcggtggtcaggtaggcgacaccggtgtattggtcagcgaattcgagaccatcgaagtgattgacaccaagaaagagaacaatctaccgatacatattaccaaaaagttgccggaacatccggaagctccgatgatggcttgtgtagacaccgacaaacgggcagcctgcgcagccaatcactcggcaactcacctgctggactctgccctgcgtgaagtactgggcgagcatatcgaacagaaaggttcgttagtaacaccggattcactgcgtttcgacttctctcacttccagaaggtgaccgacgaagaaatccgccaggtagaacacctggtgaatgccaagattcgtgccaacatacctttgaaggaataccgcaacattcctatcgaagaagcgaaagagctaggagctatcgccctcttcggtgaaaagtacggtgaaagagtacgtgtcatccagttcggttcttctatcgaattctgtggaggtatccacgtagccgcaaccggaaatatcggtatggtgaagatcatttccgaaagctctgttgcagccggtgtacgccgtatcgaagcatatacgggagcccgtgtggaagaaatgctggataccattcaggatacgatcagtgaattgaaatcgctcttcaacaacgcacccgacttgggtattgccatccgcaagtatattgaggaaaacgcaggactgaaaaagcaggtagaagactacatgaaagagaaagaagcctcgctgaaagaaagactgctgaagaatatacaggaaattcacggtatcaaggtaatcaagttctgtgctccgttgccggcggaagtggtgaagaatatcgccttccagcttcgcggtgaaatcacagaaaacctgttctttgtggccggaagcctcgacaacggcaagcctatgctgaccgtcatgctaagtgacaatctggtggccggtggcttgaaagcaggcaacctggtgaaagaagcagccaaactgattcaaggcggcggaggcggtcaacctcatttcgctactgccggaggcaagaatacagacggactgaatgccgctatcgaaaaggtactggaactcgcaggtatctaaaaaagcagtaacatacatccaatacaagaaccgtgtcttaaagtcacccgcactttaaggcacgtttttttatttcagattccagtgtcaacagcaactaatcagcctcctgccaaaaatattcgtgatataaactcaattatcacaactttttcctacctttgtaaacagattaattatttttcttatccttcaaataataaaataagtaatcaccaatacccgtacaccgatgaaaacacctatttacctacttctaatcgtttgtatttttgcatcctgcaacaccaaacagacacaagctgaaattgattacacatcgtatgtaaatccttttattggcaccgatttcacaggaaacacttatcccggcgcacaagcccccttcggtatggtgcagctcagcccggacaacggacttccgggatgggaccgcatctccggctatttttatccggacagcaccatcgccggcttcagccatacccacctttcgggaacaggtgcaggcgacttgtacgacatctctttcatgccggtcacactgccctacaaagaggcagaagcgccgctgggcatctactccaagttttctcacgatgaagagagcgcctatgcaggctactatcaagtacgtctgaaagactaccatatcaatgtggaactgaccgcaaccgaacgttgtggcatccagcgatacaccttccccaaagccgaagccgccatcttcctgaatctgaagaaagccatgaactgggacttcacaaacgattcgcacatcgaagtagtggactctgtgacgattcaaggataccgttactccgacggctgggcacgcgaccagcgaatctacttccgcacccgcttctccaagcctttcgacaaggtgaaactggatacgactgccattatcaaagacaagcaacacatcggtacggctgtcatcgcacgttttgacttccataccgaagaaggagaacagattctcgtcaataccgccatttccggcgtcagcatggaaggcgcagccaagaacctgcaagccgaagtgcccgaaaatgacttcgacaagtatctggcagaaacaaaagcaaactggaaccgccaactgggaaagatcgaagtcgagagtaacaatcaagacgataaagtaaacttttatacagctctgtaccactcgatgatcgcgcctacgatttacagtgacgtagacggagcctattacggtcccgacaaaaaagtacatcagagtgacggctgggtgaattacagcactttctccctttgggatacctaccgtgccgcccatccccttttcacatataccgagccggaacgtgtcaacgacatggtaaaatccttcatcgccttctttgaacagaacggacgcctgcccgtatggaacttctacgggagtgaaaccgatatgatgatcggctatcatgccgttcccgtgattgtagacgcttatctgaaaggtataggcaactttgatgcggagaaagcactggccgcctgcgtagctaccgccaacttggataactaccggggcatcgggctatacaagcaattaggctatattccttacaatgtgacagatcattacaatgccgaaaattggtcactgtccaaaacactggaatatgcatttgacgattactgcatcgctgagatggcgaacaagatgggtaagaaggagatagcggacgaattctacaaacgttctcataactacaagaatgtttacaacccggccacttcgttcatgcagccgcgtgacgataaaggaaactttatcaaagacttcaaagccgacgaatacactccgcatatctgcgaaagtaacggctggcaatacttttggtccgtgcagcatgacatagacggtctgattgatctcacaggaggcacaagccgctttgcagagaaactggacagtatgtttacctaccatccggcagccgacgaagaacttcccatcttcagcacgggaatgatcggacaatatgctcacggaaatgaaccgagccatcacgtaatctatctcttcaatgccgtaggacaacagaacctgacacagaaatacgttgccaaagtaatgaacgagctttacaagaacgagcctgccggtctttgcggaaacgaagactgcggacaaatgtctgcctggtacgtattcagcgcaatgggattctatccggtcaatccggtcagcggaaagtatgaaataggtactcccctgttcccggagatgaagttgcatctggctaacggaaagacatttacagtacttgctcccaaagtaagcaaagagaatatttacattcaatctatcaaagtagacggtcaaccgtacaacaagacctaccttacccatgaacagattatgagcggtgccaccgtcgaatttgaaatggggaatactccattagtggaagtcgaatttgaagaacagacccagtaggtccacctaaactaatctatcggaaaaatgaatgaaaacttcgacttaacctacaaagctctattccgcaggtactaccccagcctgatattctatgccacccgactggtaggagaagaagaggcggaggatgtagtgcaggacgtgttcgtagagctttggaaacgaaaagacagcatagagataggagagcagattcaggctttcctctatcgtgctgtctatacacgtgcccttaacgtattgaaacatcgtaatgtagaagatggctattgcgccgccatggaagagataaaccggaggcgtgcagagttttatcagccggacaacaacgaagtgatccgcaagatcgaagaccgggaattgcggaaagagattcacgatgcaatcaatgagcttccggacaagtgcaaagaagttttcaagctcagctatctgcacgacatgaaaaataaggagatagccgatgtactgggagtttcactccgcacggtagaggcacatatgtataaggcattgaagttcctgcgaaatcgtctcggacatctttggttcattctcctcttatttttattggattaaagataagtgtttttgggttttcaattgtattacttatatgaaggaaaagaaaatgagaaatctgagcgaagaaataataaacagatatctgactggtcagtgttctgaagaagagctgatcaaggtgaatgcctggatcagcgaatcggacgaaaatgcccgccagttgttccgcatggaagaaatttatcatctgggtaaattcgaccattatgccgatgaacagagaatggctaatgcggaaaaaaggctttataaacaactgtcgcaagagaaaaagaagaaagataaagtactgcatatgcatcgctggatgaggtatgcggccatccttgccgtcgctttactaatgggcggaggagccggatattggttctacaaccgaccggagcatcagatgctggtagccgttgccaatgaaggcatcgtgaaagaagttgtcttgccggacgggacgaaagtctggctgaacaatgccgccatgctgaagtacccgcgcgaattctccgaaaaagaacgtaatgtgtatctagacggagaagcctatttcgaagtaaccaaaaaccgccataaaccattcacggtagaaagcgacgctatgcgcgtacgtgtactgggaaccactttcaacttcaagtgcgacaaacgttgccggatagccgaagcgaccttgatcgaaggagaaatcgaagtgaaaggcaacaaggacgaaggacaaattgtcctcgccccgggtcagcgtgccgaactgaacagaaacagcggacggctgacggtgaaacaggtcgatgcgaaactggatgctgtatggcgtgacaatctgataccattcaataaagcaaacatatttaccatcaccaaagcactggaacgcttctacgacgtgaaaatcattctgtctcctgacattcggtcggacaaaacatattcgggtgtattgaagaaaaaatcaaccatcgaatcggtattgaaatccttgcagaattccatacctattgaatataaaatcgtaggaaacaacatctttatctcttcagataaaaaatgagtcctgtgttaaacttaaactaataaacgacatgaaattaaagacacttctgataggatgtttcggaggatttataatgctcaactcctgcacagagtcccccagtgtaaaagattatagtgcttatgtcaatcctttcataggcaccggcggacatggacatactttccccggagccgtagttccgcacggtatgatccagcccagtccggacacccggatcgacggctgggacgcctgctccggttattattacgatgacaacacgatcaacggtttttcgcatacccacgtcagcggtacaggctgttgcgactacggagatgtattactgatgccgattgtcggcaaaccgcagtatctgacaactgatccggaaagccagaaactggcttacgcctctgctttctcgcacgagaatgagactgcggaacccggatattactccgtcttcctcgacacctatcaggtaaaagcggaaatcacagctaccaaacgcagcgccatccaccgctacactttccccgaaagcacagaatccggatttatcatcgatctggactacagcctgcaacggcagaccaactacgagatggaaatcgaagttatcagtgacacggaaatctgcggacataagaagacgacttactgggctttcgaccagtatattaacttctacgccaagttttccaaaccgttcgcatataccctcatcaccgactctgtcacaatggacaacggcaaacgcctgcctgtatgcaaagccgtactgcactttaatacaaagaaagacgaagaagtactggtaaaagtgggtgtatccgccgtcgatatcgccggcgcacgcaagaatgtggaatccgaaattcccgaatgggacttcgacaaggtacgaaaagatgcccgcattgcctggaataattatctgtctaaaatagacatcaccacttccgataaagaagataaaaccattttctataccgctctgtatcatacggccatcagcccgaacctgtttacggatgcggacggacgctatctcggcatggatctcgaagtacatcagggagataccattaatccgctgtatactgtcttctccctgtgggatactttccgtgcactgcacccgctgatgacgatcatcgacccgaatctgaacaatcagttcatcaattcactgatcaggaaacatcaggaaggcggaatatacccaatgtgggatctggcttccaactacactggaacgatgatcggatatcatgcggtccctgttatcgtggatgcctatatgaaaggttaccgcaattttgatgctcacgaagcatataaagccagtctacgggcagccgaatatgacactacaggcatcaaatgccccgatctggtgctgccgcatctgatgcccaaagcgaagtattataaaaacgctatcggctacatcccctgcgaccgcgaaaatgaatctgtagccaaagcgctggaatatgcctacgacgactggtgtatctccatctttgccgaagcaatgaacgacttcgaaaacaaagcaaagtatgaacgtttcgccaaagcctacgagttctatttcgacaaatcgacccgcttcatgcgcggactggattcgaatggcgaatggcgcaccccattcaacccgcgtgcctccactcaccgtagtgatgactattgcgaaggaaccgcttggcaatggacctggtttgttccgcacgatgtggaaggacttgtaaaactgatgggaggcgaggaggcttttgtagaaaagctggattcgctgtttacagtcgattcgagtctggacggagaaaccacctcggctgatatcagcggactgatcggtcagtatgcacatggcaatgagccgagtcatcacgtgattcatctgtacaactatgtgaatcgtccgtggagaacgcaggaattagtggacagtgtctaccggagccagtatgccaacaacgtcgacgggttgtccggcaatgaagactgcggacagatgtcggcatggtacatactcaactcgatgggattctatcaggtatgcccgggcaaaccggtgtattctatcggacgtccggctttcgacaaagctgtgatcaatctccccagtgaaaagacattcagcatcgtggtgaagaacaactccaaaagcaacaaatacatcgaaagcgtattgctgaacggcaaacctctggacacgccattcttcggacatcaggacattgtagcaggcggaatcatggagatcaaaatgactgaccatcctacacaatggggaagtaacaactctcctcaataatcatataaaaaccattactaatcatgaaaagactcttattgatagcttgtgtacttagttgtacgctattgtcccaagccaaagactggacgcagtatgtcaatccgctgatgggttcccagtctacttttgagttatcaacaggtaatacttatccggctattgcccgtccctggggtatgaacttctggactccacagacaggcaaaatgggagacggatggcaatatacctataccgccaacaaaatccgcgggttcaaacagacacaccagcccagtccgtggatcaatgattatggtcagttctcgattatgccgatagtgggccaaccgttgtttgacgaagagaaacgggcaagctggtttgcacataaaggagaagtggcaactccttactactacaaagtatacctggcagaacacgatatagtcaccgaaatgacaccgacggaacgtgccgtgctttttcgtttcactttcccggagaatgatcattcttatgtggtcgtagatgccttcgacaaaggttcttacatcaagattcttccggaagagaataagataatcggttatacgacacgcaacagcggtggtgttcctgaaaacttcaagaactactttatcatcgagttcgacaaacctttcacctataaggctacggtagaaaacggaaatctgcaagagaacgtagcggaacagatgaccgaccatgccggagcgatcatcggattcaaaacccgcaaaggggaacaggtgaatgcacgtatcgcctcttcttttatcagctttgagcaggctgctgctaatatgaacgaactgggcaaagataacatagaacaactcgcccaaaaaggaaaagatgcctggaatcaagtactgggtaaaatagaagtagaaggcggtaatttggatcagtaccgtacattctactcctgcctgtatcgttcgctgctattcccgcgcaagttctatgaactggatgcaaacggccagcccatccattacagtccgtataacgggcaggtacttccgggatatatgtttaccgataccggtttctgggatacattccgctgcctcttcccgctgctgaatctgatgtacccgtcggtcaacaaagagatgcaggaaggattaatcaacacgtataaggaaagcggtttcttccccgaatgggcaagtccgggacacagaggttgtatggttggaaataactccgcatcaatccttgtggacgcttatatgaagggagtaaaagtcgatgatatcaaaacgctgtatgaaggactgattcacggaacggagaatgtacatccggaggtttcttccaccggacgattgggatacgagtactataataagctgggatacgtaccctacgatgtgaaaatcaacgagaacgccgcccgtactttggaatatgcatacgatgactggtgtatctaccggttggcaaaagagctgaaacgtcccaagaaagaaatcaacctgtttgccaaacgtgccatgaattacaagaatcttttcgataaagaatccaagctgatgcgtggtcgcaacgaagacggtacattccagtctcctttctcaccactgaaatggggagatgcctttacggaaggaaacagctggcattatacctggtctgtcttccacgatccgcagggacttattgacttgatgggcgggaaagaaatgtttgttaccatgatggattccgtatttgccgtaccgcccatttttgatgacagctattacggacaagtgattcacgaaattcgtgaaatgacagtgatgaatatgggcaactatgcacatggcaatcagccgatccagcacatgatctacctctatgactatgcgggacaaccgtggaaggctcaatattggttacgtcaggtaatggacagaatgtacacgcccggaccggacggttactgcggagacgaagacaacggacagacttctgcctggtatgtattctctgcgctgggtttctaccctgtttgccctggaacggacgaatatgtgatgggaactcctctgttcaaaaaggctactcttcacttcgagaacggcaatagtcttgttatcgacgcgcccaataacagcacggaaaatttctatattgattccatgagcttcaatggtgctgatcataccaagaattatctgcgtcacgaagatttgttcaagggaggtactatcaaagtagacatgagtaatcggccgaatctgaacagaggaaccaaagaagaggatatgccttattctttttccaaagaacagtagttagttcatcgattaaattcacgttcctatattaggcccttttgcttccggttttctgactttctctctgttctgaaagactttatccggataatggcaaaaaaaacgatagcctgaaagtaaagaagtttactttcaggctatttttcagttagtattcactacttttgccggacaaacaactataaatcatggaagaagaaattgactttaccaaagtcccctatcagtacgcaatgtgcctcaatcgggaatgttcaaaagcaaacacttgcttaagactacttacagcacaaagtgtaccggaaaagattgaatactgggttattatcagtcccaaacatctcgctgcccaacaagggaattgtccttattatcgctctaatgtcaaagtacgttatgctaagggattcatcagaatgttagaagacttgccttataagcaaatgcaaactgtcatatcacatttaatgagctattttggtcgcagaacttactaccgcatccgcaaaggcgaacgcctccttaccccctccgagcaacaaagaatattaaatatcctcaagaattacggagcaactcatctacaaaactttgatgcatacgttgaagattatgactggtgatcggcagtaacacgaagtgatactactgttacgctcagaagacacaactgtcaccatttggtggcacggctgtgccaagccgttggcacaacaatgacaccgtagtggcacaactgtgccaagcccttggcacaagggttcccttacgaggagacagggagggacatagtagcttatacaagaaaagagccaggctttcaaaatgaagcctggctctaaaattaacttatctgctaatgactagactttactgagcgttgtagatataaacttcagttacatcaatatatgaaccaaagccttccaataattcaacctttacataacgagctgttatagaagagaagaattggaaataatgattacccacacgaggaacttccaacactccctgtggagtccagttttcattatccaatgaagttgaaatacgtactttcttagaagcatacgtataataataatccatacccaaagcattaaaagtctgtgctgatttcatatcaataacaaaccagaatggattataactatatacatctgatccatagcttcctccattaccatcaatcaaataactagctctaccggagacaccagaaggaatctccgcactccaacctgctttcgacaattcagtccagttactacctataacagacaaatatttaaagtttctaagtactttatccacattaaaggttaagaagttctccttactattaaccttcacaacggggtcttcactttctgctgatgcagtaacaacaagagtgtgagattcttctccagctgttgtcagcaagaaatcatcagtaatagtccaggtaacctctgctgattctaactctccggcagctatggtaatttcagcaggagttacagtgatattcttcatgaactgttcatccaatcccgtagtggcaagtttcacttttacgtcttttcttgccggcttatccaacttcatcttgaaagtataggatataggatcaggatttacaatcgctccttgagaaaaagcacgttcaaatgtaacgttattaccgctctcaccaaccacagagcatgaagctgtgtatgcctccttctctattacaactttagattctattggttcagttcctatcttatatccttccacactggctttcacccctaattcataagtagtcgcatcataattggatgctgcaaaactaaaatcttcatccttcaaagtcacagtgacagaagcatctgttgaaccggcaggaagaactactttagtggcactgatctctacattttcttttgggatattagtatttataatatcaaaagtcactgtagcatcttccggtgatgcagcaaaatggaatgtataagttctagtgacagggccatctaattccaatgtaccatcagatttgtaaaccgcagtcaacgtcgctttagacgctccttccgcatcgtcaatcgttatagcaggctgattcaccggatatttaaccaaatccaccacctcatcatcctgacatccagcaaaagtaatgaatgatcctattgccagagataaaaagagtttataatgtgctttcatattcttgttttttatttgttcctattttatttaaagatcatccggatatttatatggcgtcggatcattcttcttgtagaatatagtcggtgctgctacattggacccgtacaatacttcgccaccaccttgaagacggctgaaaacactaccatatttagccggacttggagcaaatcccataaaccatccataccctccatctatcatactttgagctttagaggcagataaactaccgccaccgcctaagttgaattccattgaaataccggagcattgtttctttgtcatttgtccgataggatatgcagcactaccatagttggctaccacaatatctatccattcttttgcatctaccccgtcgacagtagctacaccatacatctgtccccaatcaaatacagtaaccagtttatccggcattgcctgtttggtttcataacacagacgagctgcagcagccgtacttggattagtaagagacggattgctcaaatcaggactgtttgaatactcatcgtcataatttactccatccaagttatatgccttacaatactgagcaacttcgcgggcaaagtctttagcaccttgttcggaaagctgtgccaagcctgtaatgtcatggttaccaagcagtcctaacaatactttcacaccacgtctacgcagtggctgaagaagagtttcattattatccaacagatactgtacattcgggttacattgtacacgaggacgtcctgcttcagcatcatagttgatattagcagcaaacagtacaacaacatcccaaagaagttttccattctctaattggaaagaaagagtattcagcggatttacgtcatttacttcaaagaacaaataaccttgcattacaccttctcctttatatgcatcaccggcatttcgcatatctttcaccagataaatacaatgtttcgcatcttcatctttaatagtgatatcactgctctgatcactgatagctaccggaatagcatatgttttatcttcctgcagaccttctcctgcccgaatagtcatctctacctccgctgatttagtattagcgttcactgtaagtattccttcgttagcaaaggtaaccaagtcctgcggatacaatgcaaaatctgtattatgcgccttattatacgtttccaaataagcagcatcaattttcacttttgccgatgtagctgtattaggtgtcttgctcaaccccatttttactgtagtagcataagtctcaccgtgcaattcgacaaccttagaaactaagttcgactttccatcacgcagatatgcattattttcataaatgccactgtaggccgactcatcaatattctttccgacctcaagatcatcagcacaagaggtcaagaatgcagtactgctcacaatcatggcagcgaacaaacccgaagttatatatttcatattcataatgaattcttgaataaaagattaaaccaacaattaatttatcttaggaatctctacttttacccaagtaggatcgcccgaacctgtaatatcattaccatgtccagtctggtcggtaataacatttccagcaccttcattaaacttccagtaagcaaccagtccttcactggcaggatctacttcataaggattagtggcaatttgctctgccgttctttgcactgaccacacgcggacttctgaaatatctcccggcaaccaacgagtatcatcccaagcgcgaccaatataacaaccactgctcaaagatacattacctgaagctgcttcgtctttataaacaggcacaccatctttataatagattcgttcttttgttgtattatcataaacaatggcaatgtgtacccactcattaaccggtaaacccggaacaacattcggacctgggaaattaccaccgggagctactacctgaacttgatcacgtggacggtcagcatcaccaatacgtacaaggaatttaccttcaataccgaaaacagaactcagggcattatcacgtcctgctacccagtcttcactacgaaccaaagcttcaatagtaacagtagaaagactattcacactgctcttccagttaattgggaaatagatttctttgatatttgccactacattaataagggcagcacccttaaatatgaaataagcagtacgggcactttcgagtacatcaatattggatgcatctagaatggtgacgggcaatacatatcgttttgacttatccaattcgttggtattcttaaagtcaatcacaatattatcactggaaatatcccctgccttaatagtagcagtttttgttggtatattataaaaatatgaatccagtgcagttgcgttatcattgtaaatcaaattatatgctgctgtcatagcgggagccgcatcaaagcttatttgaatatcttgttctgccggcgatgctatacgatagctaagttcacgggtagcctcagttatactgggtttaatcagcaaatcatcacaaacaggagccgagctaacatagagtttattgtcataatgatgctcttcattgatatcttcattcttacaaccactcactgtgactgttgtaagagccaaaagcgcaaaacaatatttatagagtttcatttctattcttatttattaggattcataatacgaataacttcacgcacatatccataagtattgttataataatcattatggacattcataataaagattcctttccgggtgtaattaggagatgcttcaaccatccaccgggctgctcccggagctgctactagtttattgcctttttcatccactgtactccagtaacccttcactttatccttatcgtcagcctgcggcaattcgacacaaacgataaaacgatcagcaggaacaggattcactcctccttctgtaccgcctactgcatctatacccgcctgaatagccaaatatgcttttaaagcaagatcatcagcattggtagaagaagcagttttcaacatgatgtagtcaaacttgcttaacatatccatattctccggcactaaatattgtacatttccgtagaataccagagtcttgtcatcatgattgccttgccagttcatcacctcgccaaaaaacttctgttgacggtcattatattctttcagagctgcctccggaaggctcaccagcgaacgccctgtataatcagcaataacaccatcaaagttatatttgtcacagagtgccaacatctcattggtgcgttcaccgatatactgaagagcatcctcttctgtcaactccggttcggcttttactttctccttccaggcattttcaatgctggaataatcaatactgtaaaccgtacgagttcctttctcgcgtattttgaccatttctgcctgtacttcgggacttacttccggattattcagacaaatgaaatcaacgctgtcaggtacgacggtcagacgttcagcctgcttgccgggagatcccttagggttctcgaaagaaacaaaagtgaccttatgttcttcagacttatatctgttcaaatccttcagatagtcagcatacaactgaggattctgctcttcaaatgtaggagtattcaattggagactttccacatctgtccaatcactacatgaagttattgtcagagctgatgccagaaacagcagagcagacaatctatatttcaggttatttttcatatatactttcctttaagtttaatattattttttagaagcccaccatacatctgtagccatgttatctgcaccgtgcaagtagttggcaatcgcatattctacatttgctttattgctgacaaactcatccaacggataaggcatacgacgcgcccctttctctgaatcaacgacaccaccgctcttattttctttcaccgggatcagtttcggatatccggtacggcggaagtctgcccaagcttcattacccaattgccagttggcaatccacttctgcacgataatgcgttcttgcttctcttctttgtcagcactatcattccatttaatagtgatattggacaaagcattctgataagtgttcgtacctgccgggtctgtatatgcagtcggtttgtttacatcatctttcagatagtcttccacaccgtctgcaccccattgctcaaatgacagacggataccttgattatagaatgattctgctgtaccacccatgctgaagttaaaaacagcttgcccttcagcacgtaagaaagctacttcggctgcattcatccaataaagcggagatgtaggagcaatgttcaccccagagtatttatgtccggttgtcttcagttcgggaatgacaataccacgacgcattcctacatagtcctgtcccgcccattcggattttgtgaagaacttttcacgtctgttatccttgtaaccattcatatagcagatgatatcggcagcagcatgcgtatcaccaccagtcaaacagggtacaccgccatgatcggaagtctgtacctgattgtagcgggtagctacataaataggattttgtgaagtctcaaagtagttccatgttgcattgtccgcattcgattcgatgacacctccgtttgcaggattcacagcttcttcagccatctgttgagctttcaccggattagcataagctatacggatagcaagacgcaacttcagtgagttggcaaatctgatccacttctttacatcacctttatatatatagtcggctgtaggaacgagctgttcgttagaattctcattgagtgtggcaatagctgcattcaactcatcgaagaatgtattatatgttacttcctgagaatcataaggagtagcaatttcgccattcgcacctatctgagaataaggtatcggaccgaaagcatcagttacacgatgcatagctgccacctttatcacttgtgcaatggcataaggaaccggatcattcgtattttgtgatacaagtttcacttgggtcagattagaatataatgtcggaataatcttatcacttttcagaaacacacggctccagtcgtctttcggattgaagtttgaaatggtttctgtaaaaccggcattagaatcggcaaaatatccgcctaaaggtccgcccaacaagcagtctgtgaactgagctgtatttacatccggtgataccacgcaaccggccaggttattcatggcagatcccaaagcatatccatccgctgacaaatcaggagcttcatatgggttggaattgatattctcatagttaccgatacacgaggacagggcaacggtaagagatccaaatactaatttatttattatatttttcatacctatcttgatttatttagaatttaaagctcagattaaagccaatattacgcaatgaaggcatcataaagtagtcaattccctgatagaagttatcagtagatgccacgctttcaggatcgaaaggagccttgttgtagatcatccaaagattacgtccgatcaatgaaactttgatatcacacacattgcccagccattttctcggaatagtataaccgatagaagcttcctgcaaacgaatattagtagcggaataaatgtaatactgaggaacagccgtaccaccagctactactgaataccagccttccggatttacacggtcgtttccatttaccgatacataacctttgtcacgtgcagcagcagatgcttcagaaactccgaagttatcaagaacagcttgtgtacgtgagaatacaactccacccagacgagctgatacaaggaatgccacattaatgtttttccaactgaaattgttacgccatgccaagtttcctttcggcaatacactacctaatttgatgtaattattagcttccagactctctgttacaacactgttgttctcatcgatataaacagctccattggcatctctcttcaaatccatcaaggagtaaatgtcacccatgcttccaccttctttcaggatgaaacgggtactacccagaccacccatattcagagaagaaatagagaatttctcgcgagtgataggattgatggcattatcagctaaggtaagaatcttattcttgttcattgaataagtaactcctgtattccaagtaaaatctttccatgtattattgtaattcaacgctaactcaagaccttgattgcgaactgcacctgtctgaatgtagatacgagcatattcacctaccggcaactcaggattgaatgtctgattcattgtcttggcgttataataagtcacatccagttcgaagttcttaagaaaacgcatattcatacctacttcaaaagaattggtacgttccggtttcaagtcatataccgggaagtcagtcaggttactccactgaccgatactggtattccatgcgaacaaaggattagctatatatctttcgaatgctgtacctacagaagcaaaagaaccgcgtatcttccagtaagacagatagtccttattcaatttaggcatcaattcagataacactacagacatacctaccgaagggtagaagaatgatttattgacagagttacggcctgccaactgtgaaggccagtcattacgacctgtcaatgtcagataataagtactttggtagccaacttcggcagatgcatagatagactgagtctgttcacgccatcctgactgcattttgcttgtcttggtcgtactcaggttttgaatatagaaaccgtttgtcaatccggctttttcaccagcaaacgtttttgaatcatcagcaataggtccgcgtacagccatttcatcatatcgcatatcagtaaacgatccacccatattagcttgtaaagaccatttttcaccgaatgttttgttcacacttaccaggaagtctgcatacaactgcttttcgtagcttctggaaatgccataaagaccacgatcagacaactctgtcagctgagtatttgtactggcataagccttttccgtataatcattgttagaattatccaggcggacacgtccggaaacatttaaccagtcaagaatctgataattcagacttgcacctaacatatagcggtctttcttattttcacgcaagttacggtagttcacccaataaggattctgcatagtcatattaccatcacctgtcggccagtactgagtatagatcttacgtgcaacgtcatagcgttcgtacattttaatatcttcccagtcattaccacgagggaacagataagctcctaccaacggattgttgtaagtaccctgattcaccatattgcggtctttctgcaaaatgtagctggcatttacatccaatgtcatcttatcatcaagaaatgaagtagtattgcgtacgttgaaattataacggtcatatttgttgttaggaacgataccttttgaattaaccgctgcagcggaagcataagtctggttcttttccgaaccggtagagaatgatacgctttctgtacctataacaccagtctgaaaataatcatcacgaggattatatccaaaatatctggcttctgtcagtttagggccccagctacgactggagttatcatctttcacgccaccaatacctgtaccataacgtgtctggaaacgaggcattaccaaaggagcattaaactcaacattactattcactgtgatattcacacgaccttcttttccttttttagtagtaatgataatcgcaccattggcagcatcagaaccgtaaagtgcagctgctgccgcaccagtcaacacagacattgattcaatatcttccgggttaatgtcggcaatcggctcagtatttcctttagaagaaaactctgtcccattcactttatttgcattggagtacatcggaaccccatctactacatacaatgcattggaagactgcatgatagattttgtaccacgcatcactactttagatacaccgcccactccggatgaagaagcattgatattaacacctgccactttaccactcaatgagttaataaagttaggatctttattggtagtcactgcatcagcatttacctgctgtacattgtaagacagcgctttttctgagcgtttgattcccaatgccgtaactacgacttcatccaagacttgagcatcttcctttaaagtgatattaatagcagtctttcctgctacagccctctccaaagtttgatatccaacatacgaaaattgcaaaactgcatttgaacctgtaacgactaatgtataattaccatcaaaatcagtaatagtaccattagttgttcctttttccaatacagaaacgccaatcaaaggttcgttattagcatctaccaccttacctgttactttctgttgttgttgagtcgactttgtcgaagaagatgcatttgctttcgacaaataaacaacattgtcatcaattttataaacgacatttttccctttcaaagccttatccagtacttctaccaaagaaacatctttaacattcaatgactctattcgcattgaagccaaattgtcatcataaaaaaattgatacttggattgagactggatttgcttaatcacagttcctaaagaagaattggagatcctaattgttaactgtgctattgcagattgtgccggaagggcgaatagcatcaagatcaacaatgcccgaaaaatcttcgagcctctacacgagtcattgattctcatacacttgaatttaagattaaacattagtttttatataaatattagaatcgatattccatttattattttcgattcacatttatataacaacccataccttgaaaaacacttagaggtttttgaaaaaaaataaatataatctcatatttattttttcacaacgagtatctccccattcatctagactgggaatcaattatttacgaagaaaaaaaagaaatcttttataaaatttgttctttgggataattcaccagatacaatgtcttcgtggcgcgagtaaatgccgtatacaaccagcgaaaataatccggagtcaaatattcatccgtcatatatccctgatcaagaaaaacattctgccattgcccaccttgtgctttatgacaagttatcgcataagcatatttcacctgcaacgcattgtagtgtggatctgctttcatctttttcatccggtcccgcttgttagatatatctgcgtaatcttcaagtatggtataaaataatctgtcattatctacttttggcaatgcgggagaatcagagtgaagagtatccagcagcaaattggcatccagttcaaaatcattctggtcaggaaacctgagagtcacttccgcaaagcgaaaaccatacatctcacgcgtcttacggacacgacgcacgactgctatttctccattggcaatgaagtccatttccttatattgctctgtccaataataattatttttggctatcatcaacatatctcccgtattcagttcatcttcccgccaaaggatctgtgcacgtattccgttattatataggttcgcgcgtttattagaacgacagatcacaatcgtctcatccatgccgtcatgatcataacaactagtgatggcatcaatcaattccgtacccggcaccatctttatatctggaaaacctgttatctttattttaggtaaagagtagcaattatcttccgctatcagctgacgcaattgagtcgcattccacaaaatgcccgattcctgtatctgacgaaccacttgcgtcaagtcaacttcccgcacttccaatccatatccctttaatgcatctgcaaaaagtgccggactcaactcctcacctaccggaggaagctgcgcagtatctcccatcaacaaaagacggcacccctgaccggaataaacaaactgtatcaggtcgtccaataatcttcccgtcccaaacatactgcccgacaatccttcattggaaatcattgaagcttcgtcgactataaacaaagtattcgtagcaagattgtcatttattgaaaaattactggtttcattagaaaacgactgctgccggtatattttcttatgaattgtaaaagccgggtgaccggcataggatgaaaaaacttttgcagcacgaccagtaggagccagtaacacagccttttgctgtaactgatccatcgtcttcaccaatgcccctaccaaagatgttttaccagtgccggcatagcctctgaggataaatacttcatccgccagtgtggaaagcagaaactctgaaagagattttacagctatttcctgctcaaaagttggttgataaggaaaattttccttaatttgcctttctaaatagttatttatcatttttgtacgagaaaaaagttcccggaactatcgtatttaaatttatttattctatttttgcgatgcgaatataacaactaaaaacataatttatcatgaaaacagtatttaatattgtattagtactctgtgctgctgcattaatctacatttgctatagcagtattatgggtcctatcaattttgaaaaagcgaaaaaggaaagagagcaggctgtcattgcccgtttgatcgacatccgtaaagcacaacaggaataccgttcgcttcatcacggaatgtacacagaacattttgacacactgattgatttcgttaaaaatcaaaaattacctttcgttatgaaagttggtcagctgacagacgaccaattggaaagcggcttgactgagaagaaagcaatggcaatcatcaacaaagctaaaaaaacaggcaagtatgatgaagttaagaaaaacggacttgaaaactttaagcgtgacaccatgtgggtagctgtaatggacaccatctatccaaaaggtttcaatgcagattcaatgaagtacattccttatggcaacggtgctatctttgaaatgaatgttaaaaacgacacagctaaatcaggtgctcctgtatacttgtttgaagtgaaagctccatatgaaacttacttgggcggacttgacagacaagaaattatcaatttgaaagaccttaatgaaaaactgggcagatactcaggtttgatggtaggttctattgacaatcctaacaatggtgctggtaactgggaataatgattgattttacaaaatcaaaacaatatactttatccatccgtcttagtacggatggattttctttttctatctacaatccgattaacgacaattcgcagtcgctgttcgaaaaagaggtagacacctctctgtctctgacagccaatcttaaaaacgttttccacgaatcggactttttaagctactcctacaaacgggtgaacatcatgatagccagcaaacgctttaccatgataccattggaactgtttgaggaagaacaggcagagcttttattctatcacaatcatcagaaacgggagaatgaaatagtgatgtacaatattctgaaaaagaataatgtagtcgtaatcttcggcatagacaaaagcacctatacattcttaaatgaacaatatcccgaagcccgcttctactctcagtctaccccgctcatcgagtatttttctatcaaaagcagactggggaatagtaagaaaatgtatgcttcagtacgcaaagatgccattgacatttactgtttcgaacgggggcagctacttttggccaactctttcgagtgcatgcaaaccgaagatcgtatctactatctattatatgtctggaagcaactggaatttaatcaggaacgggatgaactacatctgacaggcactctgtcggacaaagagacattgatgaacgaactgaaaaaattcattctgcaggtattcattatgaatcctgccaacaatattgacatgcaagccttattaacatgcgagtaatcagcggtatttataaacgaagaagatttgatgtaccacgtacattcaaagcacgccctacaacagatttcgccaaggagaatctgttcaatgtacttaataattatattgatttcgaagaaagagtaactgcacttgacttgtttgcaggcacgggcagtatcagtatcgaactggtatcccgaggctgcgaccgtgtgatcagtgtggaaaaagatccggctcatcactcgtttatctgcaaaataatgaaagaagtacaaactgacaaatgtctgcctatccgtggcgatgtatttaagtttatcaacagcggacgagagcagtttgattttatctttgccgaccctccttacgctttaaaggagctggaatcgataccggaactaatattcaaaaataatctgctcaaagaaggaggtttgtttgtattggagcatggtaagcaaaataactttgaggatcatccgcatttcatagaaagaagagtctatggaagtgtgaatttctcgcttttcagataagataaaagtatatcagataaaggaagcatcctttttaaagcagcggagccaacaaacgaacgacagactctgctgccctcctcctccacgaacgtttcacccagtttttcagaaagatctgtgtactttcccgctgatcctgaaggaatatctccttcatttcaagagccgtttccacatcatacataaaggcatttacttcaaaattatgctcaaaactacggaagtcaacattggtagaccctactgtagagagcatatcatcagaaaccatcagtttggagtgcagaaaccctttcttataaaaatagactttgacacctgcctgcatcacatctgccaggtaagaatgcgatcccaaatgagtgattcggttgtcggcacgttccggcaacatcaaacgcacatctactcctgccagtgcagctgtctgcatagcggcaagtacttgctctgtcggcaggaaataaggggtttgcatatagaaatacttcttcgctccattgatcgccatagtcagtccctgcatgatttctttccaggggccaatgggttcactggtaaccacctgcactaatgaacttccacaagattctatctttgggaaataacgtgaagctgtaatcaatgtacggtcaacgaaataccagtcgagcaaaaaggccgtttgcagaccatgcacagcctttccttctatcagaatatgggtgtcacgccaaattccccatgagaaaccacgcatataacgttctgccaggttcatacctcccacaaagccgatacgtccgtctatcacgactatttttctgtggttacgataattgaccctgcttgtaaacaaagggaagcgtactttcaagaaactcctgacttcaatacctgcattacgcatttcctcgaaaaagcggttaggtacatgccagcaccccacatcatcataaattactcttacttcaaccccctgagatgctttttcgattagtacatcccttaccaaacgtcctatagcatcatcttcaaagatatagtattctatatgaatgtgttgtttcgccttttggagctcacgaagcaatgattgcaatttggtatagccttccgtatagacagcaatacggtttccctcaaatggaaaagcttgattggtatgctggaaaagttggataaggcgggcatattcttcaggtacatccgaacagtcttgcgccatgtattccgccataggtttcttcaaaaggcggtcataacttttttgaccgatgatacgttcccgacgctgactccgaccaaagaagaaataaaaaacaagaccgacaattgggaggaaaagtaatatgagtatccatgccatagtcttcaccggattccggttatcaagaatgataacgacaatcgtactgataatggctccaaaataaacgatatcaaaagcaaccgtagctatctggctaactagtatgttccagtcaatcataggatactccttttttatatggatactgaacaacaaatataaagcaaattatcggataaacaaaaaagtcccgatggcaagtcatgttagtcatgttcattaccatcgggactttcccgttttcattcagagctagtcacaatttagaaacgcataggtctgccaccaccgccaaagccatgtcctcctctaggtccaccacccggtccacgtcgatttggtgactttccacccaacgtattaaagcgatatacaaaatgtaccatgaaataacttcctaaagtattatattcagtatcactcatcattgtttcgctaatcgaacgcgacaaactactttgttgttttaagatatcatatattttaaaacgaattgtacccgaattattctttaaaaaattcttcgaaatttgtgcattccacatcacttcgttattattaagcccacctgtatatccatctttaaatcgacaattaatatctgtggaaatcgagacttgccaaggaaggtttacattggtattacctccaatatagtagtcgaatgtttctcgattactattttcttgtttactatttctgaccaaattataattaacagaaccacttaaggatatatcaaaaacttcactacgataactactggtaaaccgttctcctaaccctaaattatgcgttgtacttagttcctgatctgcatttttagaacttccgacacttgtataacttacagcatcactaaatcgtgcatttgtattagatgaaattgtaaatttcttgttcttcaacggtgtattgaatgaaaaaaatcctcttgcttgccagttaccatttacattttctttcttataaacccgagcacccgtctgaggatcatatgtcattctatttgctacagaattcaatgtacttgtataatacaaattagcagaatagctacgcatagattccggtacaaactttctataatcgagagtaaaattattattaaatgatggtttcaaattcggattaccatatcttaggttcatcgggtcggttatatcaatcacctcctgcaggtcctcaatgttaggtgtactgcttcttccacgataacggaacattaatacatgttgtttattaaacatataacggaacattactgaaggagcccaattcaaaacattctgttctggaagattcttcttatagttcggaccaattgtcgttttacttaaggatgactgaggagtcacccccactcctacactatacatcatcttagggtgaataccacgtacagaaacatcagcagtatgagtatcatagaaattctccacacgtgtacttagttcattatcatacccacgctctatatattcaggatacggatagtagttaatactatcatacactaatgattgtgataactgtttgcgatgagcaaattcataacgcaactgcaaaaagtgatttttaaatacaggttctgtataagaagctgatacactccagttacgactatcactatttctgtctgtatagcgcgaaatatcagaaatactatccttttcgaagaattcagtctttgaatcagaataagaatcggactcgctgtcactatatccgaaacgtgcacccaaagacaagtttcgtcctttattgttcaatcttcgaaaagccatcaagctaccattaaaagatgcattatgacttttagaagaagaagctgcctctttttcattaacaggactatgcgagttattttctgtctttgaccaagaacgactgctagattctgtttgtgaataactaccgttaggacggaaaataatcgtagtcaatgtgtcaggtctccactccaaacggaaatcaacgcgaaaatcatgacgattacgatttgaaaagttctcactttgagcaaaagaagatgtttcccccaaaaatgtttctgaagaggttttgcgacgagcgtcattatcagaatgtccatattgtacattccccccgatctgcaactttttagtatccttagcgaagttgactcccaacgattgtgcagttgtaatacctgaaccagcattacctccacctagtccttgtccggcatcaccaaattcagaaaatcctttattattagtattatttgcagaacctataattgaaagactggcatcatctttaaagcggctgatcattactcccccttcataccgatcctggctaccataccctgcaataagatttccaatccatccttttttcatacctttcttaacggtcaaatccaagacgggctcttcatctccatcatcaattcctgtgatacgtgccatatcactttttttatcataagcctttactttctcaatcatattagcaggtaagttcttcatagagactttcgggtcatcagaaaaaaattcctttccatcaaccattatcttttttatttccttaccatttatagtaattttaccttcatcactcacttcagctcctggaatttttttcacaagatcttctaacattgaaccttccggtacagggtaagccgctgcagaatactctgtagtatcagcttttacagtaacaggaggagcttccgccgtaatcacagcctcgctcagcatcactgcatcagggtccagagagattgtccccattttcttttcagtcacattgttggataattgtacaggaacgaatttcgtacggaaaccgatgtaagaaaccttcaacaaatatttccccgctttcactttagggagcgtaaaccaacccttattactacttgctataccggctgcataagcgctatccggcaacgataacaattgaatagttgcttgtgcagctggctctttagagtcagattcgacaacacgccccgaaacggtaatcaccttattctgtgcaaaaatagagaaggtgcataacagtgtaagcacccaccaaactgataatcttttcatttaccttaattacgattagtagagtaataacaatgtctttttgacaaatagaatcgtaaaaggtttaatttaatagaaaattatcttttaaagaatcgatcaacaagcgcttttttaagaccaaactccaaacaaagcacattaaagattaaaaaggtgagaaaagaagaagtgtctacattgatcacatctccttgcagaacacgccacaacataccaccgaaaacaaacagaaaagtcagaaagactgcattccggactgccgcattacgaatctgttccgtctcgcggctttcattcttgcttaaggcaaagatgatcagcaagcatcctgccatcatcaacagcttcgtacattccttataaaatagcaggttatggtcggttatcaacccttgcattagcaaaatcggaagaagaaacaaagctactaacaacaccacatatcccaaaggacggcaaaatacaggaaacaatgctttcataattgaacgttttaacgagacaaaagtaagtaaaaaaagatattttatatacatttgcaccaagaaaaagcaaaagaatcatgagtaaacaagaagtcattctctgcgaaagcttggaaacaagcctcggtcgtgccattgaaaggtgtccgcatgacaagttattcatcctcacagacgaacatacccagcgtctttgtctgccctcattgaaagaggtatcgtttctgaaagacgcagtcgaaatctgtatcggagccgaagatgtgcataagacactggagactctggcctccgtatggatggcactgagtcagcaaggggctacacgtcactcattgctcatcaaccttggtgggggcatggtaacagatttgggaggctttgccgccgctaccttcaaacgggggatttcttatatcaatatacccactacactgttggctatggtcgacgcgtccgtcggcggtaagacaggtatcaacttcaacggactgaaaaacgagataggctcgtttgctccggcagacagtgtgctgattgaaactgaattcctgcgcagcctcgatgcacagaatttcttctccggttatgctgaaatgttaaagcacggattaatcagcaataccgcacactgggtcgaattactggatttcaataccaataacattgattatgcatatctcaaaaatatggtgggacgatcggtacaggtgaaggaagacattgtggagcaagaccccttcgagcgtggcatccgtaaagcactgaatctgggacatacagcaggacatgccttcgaaagtctggcattggctgagaatcgccccgtgctgcatggctatgccgtagcatggggaatcgtatgcgagctttacctgtcacacctcaaagtcggctttccgaaagacaagatgcgacagaccatccaattcatcaaagagaattatggttcattcgcattcgactgtaagcagtacgaacaactctacgcatttatgcaacatgataagaaaaatacctcaggaacggtcaattttactttactgaaagagatcggagatatttgcatcaaccagacagctgataaagacacaatttttgaaatgcttgacttctatcgcgaatgtatgggagtctgatcttgaaacttattataataatgaaggagaatgggattccctaaaaggtttcccatttcttctttccctttcccattctcctctccccacatatgcctttattccccacaggcatcttcaatattatcctaagttactcatccggtattgggacaatgacattccggtatgtttcctgaagaaacgtcccaaagacgactgattggcaaaatttgttttcacggcaatttcctgaatattcatattcgtattcttcagcaaagcctttatttcgagtacgatgtattctacaatccagtctttggcagatttgccgctcacttccttgatcaccatcgtcaggtatttggatgtgatacacaacttatcagcatagaaagcaacatccttattctccttgaagtgcttcattatcaacccaaagaatttattagccagttcctctttacgagtatcttttcgggtagtcatcagagatgcctccttttcataagcattaaacaattccaaatataagtatcttaataaatgaataatcagctcacgcctgtatatatcattagacgtcactttatcctttaccattccaaagaaattcatcaaccgccgggtatcattttcggtctgaggataccaataatgggtcctcatatagaaaaagaaatgcggtgaaaagcgaggcacaccgctcagcgcatcgctgaacattgtaggcgacaccaccaacgtagtagtcagaaaatcatcactggcctcggtgaacgaaacgaattgtcccggcaacagaataatcaattcctgcggctgtatccaatgcgaatcatcatatacattaagcttggcctttccgctgaagcaatacacgaccaaagcagactgaatattagaaggataaacgcttaggggaagatacttcaaattctgaaaatacttaaaatcatcacctaagacataagcttctaacgtttctctatttttattatacacatttaccccctcattaaataaaactaaatacaaaaatatactatcctaaactactctcatgtctcgtatgccgatatggtttcattttaaagaagttacgcactatctattcacttaatttcataaacaaaaccctgttatgttagtttgcaaccacctatattatttagaattattatggactaaaggactttttattccgcaaacggaaacttatcctaaaatcagctaatggaaaaaaacaggctatttatttgctatttaaaaataaagcactacttttgcaaccgcaattcgggatgtagctcagcccggtagagtacgcgtctggggggcgtgtggtcgcaagttcgaatcttgtcatcccgactaccgacaaagcattgataatcgatgggttattgatgctttttttattgaaacgagaatgaaagaagacccgaaacatattcacatcagcgaatacaactatccactatcggatgaacgaatcgccaaatttcctttagcagtacgagaccagtcaaaactgttggtatatcgccacggtgaagtaagcgaagatgtcttcacatccttgccggactatcttccgaaaggaagcctgatggtattcaacaacacgaaggtgattcaggcacgcctccacttccgcaaagaaacgggggcgctgatcgaggtcttctgtctggaaccgattcagcccaacgattatgtattgaacttccagcaaacggaacacgctgcctggctctgcatgatcggtaacctgaagaaatggaaagacggagcactgaaacgggagatgacggtaaaaggtttcccgatcactctgaccgctacccgtggagaatgcaggggcaccagccactggattgatttctcctgggacaatccggaagtaacctttgccgatatcctcgaagtgttcggagaactgccgattcccccatatctgaaccgggatacggaagagagcgataaagaaacttatcagaccgtttattccaaaataaaaggctcggtagccgcaccgacagccggactgcacttcactccccgtgtactggaagcattgcaggaaaaaggcattgatctggaagaactgacacttcatgtaggcgcaggaaccttcaagcccgtgaaaagcgaagagatagaaggacatgagatgcatacggagtatatctccgtcaatcgggctacgatcaaaaagctgatcgatcatgacggttgcgctgttgctgtaggcaccacttcggtgcgtacgctcgaaagcctgtatcacatcggagtaacattggcggaaaatcccgatgctacggaagaagaactgcacgtcaaacaatggcagccatacgaaaagtatgatcagattccgcctgtagtcgcactgcaaaagattttaggttacctcgacaggaacgggctggaagcccttcacagcagtacgcagattatcatagctccgggatatcagtataagatagtgaaagcgatggtgaccaactttcaccagccgcaaagtacgctgttacttttggtttccgccttcgtgaagggaaactggcgcacaatttatgattatgcgctggcgcacgatttccgttttctgagttatggagattcttctctgctgataccgtaaaccaaaaagtaaaaacaactatgccaagcgataataatcaagaaatgtttcccatcgtagacgaacagggaaacatcaccggagccgccacacgcggagaatgccatagcggaagcaagctccttcatcctgtcatccatcttcacgttttcaattcgaaaggagatttatatctgcagaaacgtccggaatggaaagacatccagcccggaaaatgggacacagccgttggcggacatattgacctgggcgaaagcgtagaaatcgcactcaaacgggaagtccgcgaagaactaggcatcacggactttactcccgaactgctaaccagctatgtattcgaatcggatcgtgagaaagaacttgtctttgttcacaaaactgtttacgacggtgaactgcaccccagtgacgaactggacggcggacgattctggaccatcgaagaaatagaagaaaacctcggaaaaggtattttcacccccaacttcgaaggggaattaaagaaagcatcccttattccgtctcttttccctgctcctactcctgctctatccaagtaacgattttctccgagagcggactctctttgggggccacaaagccgacccagtttccgttctcgtcaatcataaacttctgaaaattccactggacgggcgcatcttctttgccgttcagtttcttttccgtcagccattggtaaagtggcgacatgtttttgcccttgacggaaatcttggccatcatcggaaaagtaacgtcatactttaaggagcagaactgagcgatctcttcattgcttcccggttcctgtcccataaagttgttggcaggaaagccgatgattacaaaattcttatccttatatttatcatatagctcttgcagtttggcatactgtggcgtcagtccgcatttggaggctacatttactaccagcactttctttcctttcaaagaagaaagcggaaattccttaccatcaatcgtggtcacattgaagtcgtagaaagacttattctgcgcttccagagagattgcacataccattgttataaccattaagatgaatgacttcatactgaatatatatttagtttgttatataataaacgaggttatgcaaagaaatgttctgccgcagcataagattgcttgtttcttcgtatcgatgtcgaatggttcaacaaaagttgaattcaagttatatatgcgagttgcctacttaaatcttactacatagtttatacagactttttgccgtcatccgtcacttttactgtttttcaatcattaattcactgttaatcacttcattaatcgagtgacggcaagagtgatgacaaagtgatagcaagcaaattcaagattttgccatcactttttctcttccaaagattgagtcaaccaactgagatcagagaatgcacttaagtactcttgcaaaataatcttctcttattgaacacagatgacatacttagcaagaaatttcattcctttttctttgcaatcctcaacaattcgcgtacctttgtcccttgaaagccgaagagaaatgcggcatattgaaacgtttttttgcgctaagaaaagtaccaaatttcatttaaacaaaaaactgaacttcaataaatctgtttcatacgtgcgacttagggtcgggcgtgtgaacatatttattaagttcagtaggtattggtactacctcttagcggataaatatgaactcagcgcccggcttcttttatatacgtacgtagtatacaacaggatgcgagcggtcataaatattcaaagagatatgaacagaccagacaaagaaacattgcaccgcgtcatccggaagatgcacagacaaaatgattgcgagaagtttattgaattagcatccgtatttaccggtatgctagggaaacttgatttccgttccgtagaattttcttctgacgatccttaccaccctttccctttatacatgaaacatattcatagtgtaatctgcgaagaagagtatctttacatactttgctataacgggaatctgcacatactgggaacctatgaacgcggacatattctgattccgctcaaagaacaactgactttacgggaactcttctgctggacgtgccgatcttggtgggatcgcctactcacaaagagcgaaaatgaactgcctatataatgagaactttatcattccgcacaaagataaaagcattgaatgattaccgaaacagcaatctttaaggtttaacaaatatgagttacaatattcaccactttaattcgtaatcctaaccagattaaatatggaggtcgcagaccgaagaaccgcttgtgaaagtagttcttcaggactgtctcccaagaggatgccgcattaccccataggcatcctcttttattattatattagcaagcagtgtttcagatagtttcctacgccggaaccaatagtttcaagcggctgaaactacagttccatgccttggaaaccttagtttcaagctgatgaaactttagtttcaagcgggcggaactctagtttcaaactctagaaaccaaaagttctatatagactatttgttccacccattaagagtatcgacatcgaagccacttactttcaacattgaaacgactccttttcaacatcggattcacttatcttcgtcatctaagacattctttttcagcattgaattcatttattttcagcatattctacctctcaacttcagttctttgcggtgacaataaaaaactaagttccgcctattatcaccctattgtcacctcttattatcacccttaccattctaatttgcaacgtattaagtcgcaaaagtgacaagtgacaataaaaacgctgtataaaacgttgtggcgaataaccaaaggaggttcaaactccttgattcgacagacaacagcccttcacgttcagaccttgatttcgtcatttcacctgtcaatctttccgcttcatcctttcccgataatcacggataaggatagtccgtaactttgtaacatgaaacaataacactgtaaaatcatgtttaaagctatcgtacgtttttcgatcaggaaaaaactattcgtagggttaaccaccctcttcctgtttatcgggggaatctatgccatgctgacgctccccattgacgccgtgccggacataaccaacaatcaggtgcagattgtaaccgtatctcctacgcttgcgccgcaggaagtggagcagctcatcaccatgcccatcgaaatagcgatgagcaacatcatgaatgtagaagatatccgttccgtcagtcgcttcgggctatcagtggtaacggtcgtcttcaaggaagacgtgcccacactcgatgcccgccagctgatcaacgagcagatacaaaccgtatccggcgaaatctcccccgaactgggaacaccggaaatgatgccgatcaccaccggactgggcgaaatctaccaatacatattgaaagtagctccgggatacgaagagaaatatgacgctatggaactccgtaccattcaggactggatggtgaaacgccagttatcgggcataccgggcatcgtggaaataaatagtttcggaggttatctgaaacaatacgaagtggcggtagaccccgacgccctgttttcactgaacatcaccatcggcgaagtgttcgaagcactgagcagcaacaaccagaacacgggcggaagctacatcgagaaagcaaagaatgcctattacatccgttcggaagggatgatcacccgcatcaaagacatcgagcagatcgtggtagccaaccggaacgggattcccgtacacatcagtgacgtaggcactgtccgcttcggcgcccccaaacgtttcggtgcgatgacgatggacggaaagggcgaatgcgtaggcggaattgccatgatgctgaaaggcgccaacgccaatgtagtgacgcaggaactggaaaagcgggtggaaaagatacagcacttattgcccgaaggcatcagcatcgaaccgtatctgaaccgttcggaactggtcaaccggaacatctccaccgtcgtcaacaaccttattgaaggagccatcatcgtcttcctcgtacttattatctttctgggcaacgtccgtgccgggctgattgtagcttcggtcatcccgctggctatgcttttcgcattcatcatgatgcgtcttttcaacgtgaccgccaatctgatgagcctcggcgccatcgacttcggtattgtggtagatggttccatcgtcatactggaaggtatcctggcacacatctacagcaagcagttccgcggacggacactgacccgcaaagagatggacgaagaggtggaaaaaggcgcttccggtgtagtccgctcggctacattcgccgtactgattattctcatcgtgttcttcccgatactgactctgaacggaatcgaaggaaaatacttcactccaatggccaaaacactggtgttctgcatcatcggcgccttgatcctgtcgctgacatacgtccctatgatggcgtcgctcttcctgaaacataccatcgtagtgaagccgacacttgccgaccgattcttcgagcagctgaacaaactctaccagcgttgcctgcatgcctgcctgcatcacaaagcacgcaccgtagtcattgcttttgccgcactgatcggctccctctttctcttcacccgtctgggtgccgagttcatcccgacactggacgaaggcgacttcgccatgcagatgaccttacccgccggaagttcgctttcggaaagtatcaaactctccgaagaagcggaaaagacattgatggatcagtttcccgaaatcaagcacgtagtggcgaagatcggtacggcagaagtccccaccgacccgatggcagtggaagacgccgacgtgatgatcatcatgaaacctttcaaggaatggaccagcgcaacgagccgagcggaaatggtagagaagatgaaagaagcgctcgaacccctctcggaacgtgccgagtttaacttctcgcagccgatacagctccggttcaacgagctgatgacaggtgcgaaagccgatattgcagtcaagttatacggcgaagacacgcacgaactttatcagagggcaaaggaagccgccacgtatgtagagaaagtgccgggggcagcagacgtcatcgtagagcagacgatgggattgcctcagctggttgtcaaatacaaccgcggcaagatagcccgttacggcattaatatcgaagaactcaacacgattatccggacagcctatgccggggaagccagcggtgtggttttcgaaaacgaacggaagttcgaccttgtcgtacgtctggatcaggagaaagtggcagacttaaatctggacaagctctttgtgcgtacttccgaaggcattcagattccggtcggcgaggtggcaagcatcgaacttgtcagcggtccgttgcagatcaaccgcgacgctaccaaacgccgcatcgtgattggtgtgaacgtacgcgacgcggacattcagcaagtagtagccaacatccagaagacactggacaagaacatcaaactgcaaccgggctactacttcgaatacggcggtcagtttgagaacctgcaaaacgccatcaatacgctgatgatcgtcattccggtagcactgatgctgattctgctgatcttgtttttcgctttcaagaacattacttatacattgatggtattctccaccgtcccgctgtcacttatcggaggtatcgtagccctctggctgcgcggactcccgttcagcatctcggcaggagtcggtttcatcgccttgttcggtgtggctgtactgaacggtatcctgatggtgaaccatttcaacgaacttcgtaaacgaaataaatatgctatgactaccaaccgaatcctcactctgggcaccccgcatctgctgcgtcccgtattcctcaccggactggtcgcctcgctgggatttgtcccgatggcaatcgccacttccgccggttccgaagtacaacgcccgctggctacggtcgtcatcggcggactgattatctctaccgtgctgactttgcttatcattccggtattctacaagattgtcaactcattcgctgtatggagacgtcccggaagcaagtttcatctgccgttcttcgtcatcctgccgttgttactgctgattccttctttcgcctcagcgcagcaaccggaagcggtcagtctggaacaggccatcgagatagccaaacaaaatcatccgagactgaaaatagccgccaacgccatccgtcaggcaaaagccactcgcggagagattgtcgaggcagctcccacctcattcagttactcatggggacaactcaacggagaaaacaagcaagacaaggaacttgctttcgaacagagcctcggttcgctgctgactccgttttacaagaatgcactggtcagccgacaggtaaagacaagtacttattatcgccggatggtggaaaaagaagtgatagcggaagtaaaacgggcatgggcttattatcaatatgccgctaacctctgctccatgtaccgtgatcaggacaagatggcggaagagttgaaacgtatcggcgaaatacgttatcaacaaggagaaatcaccctgctcgaaaagaacatgatgacgactaccgccgccgatctgcacaatcgctggtatcaggcacaggaagaggaaaagacggcactggcacgtttccagtggtgctgttatgccgacagcccgattgtgccggcagattcgaccttgtctctcttttataccactctttcggacggtaatctgtccgaagcgcataccggatacttccagagtcaggcggaagaagcgaaagcaatgcttcatgtagaacgcagccacttctttccggagatcagcgtagggtatacccgtcaggacattcttcccttgaagaatctgaatgcatggatggtgggagtctccttccccgtttacttcctgccccagaaaagcaaggtgaagcaagccagactggctgctgcttcggcacagattcaggcggatgccaatatccgcgaacttcgcaataaggtaatggaactggaagcctctctccgacgatacaacgagagcctgcgctattatactacttccgctctcaaagaagcggaagaactgaccaaagccgccaacctgcaactgcaacagagcgaaacgggcgttgccgaatacatacagtccgtcacgacggcacgggacatccggcgagggtatatcgaaaccgtttatcagtataacattgccgctctggaacatgaattgtttgaataaatggagagttttaatgaacaatttccctgttaatatagaagattattttgcaagagtacttaatataaaaatgtgtatgagaaagatattttaccccatccttctgctcgccttagtagcttgcaagggacaacaacaaacggcggattcagagtctgtggcggaccctgcaacagaaagcgtgaatccggaaatgggaaaaaacaatggtcaaagcgacgccgatgccactgcacagcccgaagtggatgcaatcacttccgccacttcccgccccaatcaggtttcgttcaacggccggatcgtccttccgccccaacggcaggcaaccgtcgcactgactatcggcggagtgatcaaaaacacttccttactccccggacaacacgttaccaagaattctgtaatcgccactttggagaatccggagtttatcaccctccaacagacttacctggacagccacgcacaaacagaatatctgcgtatggaatacgaacggcaaaagaatctctctgccgaacaagcggcttcgcagaagaagttccagcaaagcaaagcggattatctttcgatgaaaagccgtcaggatgctgccgccgcacaactttcgcttttgggcgtgaatccggaaacactgcttcgggatggcatccagccgcttctggaagtaaaagctcctatcagcggatatgtggtcaatgtagctatgaacatgggaaagtacatcaatccgggagaagctctctgcgaagtgattgataaaagcgcaccgatgctctgcctgactacctacgaaaaagaccttgcagatatgcaaacaggcagtcccgtacaattccgtgtcaacggcatgggtacacaaacgttcaacggcacggtcatctccatcggacaaaaagtggacgaagtgaaccgctcactcgaagtatacgcttccatcaaggagacgaatccgcagttccgaccggggatgtacgtcacggcacatatccaaaaacaataatctgccgtgcagcgacagccattcatcatgcataattcgtaattaaccattatctttgcaacatggtattgaaagctatcaataaagataagtatttcctgtccacggtcatcatctcgctgatggtggctgtgctcattcattttccggaatcggtctctctcttcgaccgtttcgaaagccattcgcttttcccggggatgaagtttatggatgtggcaaatgagattctgtttaccttcgtttcgttactcatactttttgccatcaatacgcgcttgttccatttcaaccaggcgtccattaaaataacggctgcaaagattctgctttccttcatcctgacatggatactcagcaatctgctgggacaagtgtttgtcttcctgcaccggacatttgatattcctgccatcgatgcgatggtgcaccactatctccatccgttgcgcgacttcatcatggcttgcctcgtcaccagcagttgctgcatcatctaccttgtccgccgccagcaactggtattgattgagaacgaacagttacaggcggaaaacatccgcaaccagtatgaagtattgaagaatcagctcaatccgcacatgttgttcaactcactgaatacgctgcgttcattggtacgggagaatcaggataaggcacaggattatattcaggaactctcgcgggtactgaggtatacgctacaaagcaacgaatcgcaaagtgtcagcctgcgggaagagatggagttcgcctctgcttatatcttcctgctgaagatgcgttttgagaacaacttgcagtttgatatacagatagccaagtctttcgaagactaccgtctccctccgatggcggtacaggtgttgatagagaatgccgtgaagcacaatgaaatcagcgaccgcaaaccgctgactatccatatcgtcaccaacaacgagggatatctgtccgtcagcaacgacattcagcccaaacggaccgctgcctccggcaccggcatcggacttgtcaatctcgccaaacgctaccggctattattcaaacaggacatacaaatcacagaggacaaagagttttccgtttgcattcctcttattgatgaagtacaatgaacgacaagccaagtgttatgaaaacagttattattgaagatgaaaaagctgctgtacgcaatctgacttccctgctcaacgaagtgaaaccggaagctgaaattattgccatactggacagcatcaattccaccatcgaatggttcggcatccacccgatgccggaactcgtttttatggatattcacctggcggatggttctgctttcgaaatattcgatcatatcagcatcacctgccccattatcttcaccacggcttacgacgaatatgccctgcgtgccttcaaagtgaacagtatcgactacctgctgaaacctatcggcaaagaggacatcgaacatgcgtttgaaaaattggacaacctgcaggataccatccccgaaaacggaagcagacgggaaaataaggaagaggaactacttcacctcattcactcgctgaaaaaacaggagaattacaagacgcatttcctcataccgataaaaggcgataagctacttcctgtctcgatcgacatgattcaactgttctatatcaaagattgtcaggtaaaagctgtcttaacggacgggatggaatacaatttttctcttacgctggatgagttggtcgattgtttgaatcctagtctcttcttcagagtcaaccgacagtttctgatttcaagggaggcgatcaaggatatcgatttgtggttcaacagccggttgtccattaatctgcgtcactccagaatgacagagaagatattggtaagcaaagcacgggtagcggaatttaaggaatggttttcgagcaaaaagtaaaacaagcgggactatattgaaatcccactatatgcattcgttctttataagtatcggatatcagttctaaaaaaaggatgaagcccagcctcatcctttccatttttatcttaatacctaaccttattaaaacccaattgatgatttatacttcagcgtcttctccggtaaggaaatcgaaggaggtacagcctcatcggacaccgcccgtttgtaattcggcttgctgctcatcacaaaacgaagtttcactccatcacggatatcatcatacgtcaggtaggacttatcgtactttttaccattgacataaagctccttcacgtacaggttcttcggcgaccagttgtccgctgtcatttcaatgttttttccattactcatccggaccgtaatagcctctgcgcatggcgaaccgatattataaatattgctggacggagccaccggatagaaaccgatgcagttgaacatataccacgcagacatctgtccgcaatcgtcgttaccactcaatgcatccggtgtatttccgtagaaacgatcgacaatggtacgtatccacttctgacatttccacggttctttcaggtagttgtagaggtaagcgacatgatggcaaggttcatttccatgccaataggctccgatacgtccctgtatatcatgtgctccggggatatcatccggcagttctaccgtaaaaagctcatccaggcgtttgcggaacagttccttaccggcctcgttgatatatccctgcacatcttgcggcacataccaggtatattgcatcgtgaatccttccgtgatatcaccccagccatgtaccgatcccggaccctgataggcaaccggagtaaacggagtgcgccagtcacctttgctgtcgcgtccgcgcatatatttcgtttcgggatcaatcaaggtctgataagacaaagcacggttgaggaaataatgataatcgtcttctttgcctaatttcttggctgcctgtgcgatgcaataatcatcataagcatattccagtgtctttgacactgactccgcttccttatcgaatggtacatagcccatttcacgatattccggaaggcaatcgtagttcggattcatcgctgtggttttcatcgcttcgtatgcacgctcgtaatcaaagcctttcacttctttcacgatcatatccgccaatacggatacggcgtgataaccaatcatacaccaggtttcgttgccgtagaaggaccagataggaagcatcttctccacactcttgtcgtaatgagccaacatagaatttgcaatgtccgcattcacctcctgctgaaccaagttaaaccagggatgcaaagcccgataggtatcccaaagagagaacaccgtatagttcgtgaatccttccgctttttctatgttcttgtctagtccgcggaactgcccgtccgaatcctgaaagataaacggatgcagagcggcatgataggcggaagtataaaacgtttcctttgtctttcggtcagcagtcaacgtatattttccaagttccttttcccaaagggcttcccctttcgcccttaactcgttgaaagttaatccgtcgagttccttcatattattccgggcaccgtctgtgctgactgcggagatggctgttttcaccgtcacttcctcccctgcttttgtatcaaaggagatacaagccatcagattctttccccaggcttcgtaagagctgcggaatcgggaagtgttataaataaccggctttttgtcttgtacaaagcgcagtccggtcaacttctttgagaaagtagccgtgaagtacacatgacgttccggcccccaacctttcaccagtttgtatccggtgatagtcgaatcgtttatcattcgcagattcgaccattcacaggattgccagagcgtatggttcatatcaatcatgatgaacgcattgtccgactccggataagtaaaacggaacataccgctacgcacaccggaagtcatttcggctttgactccatagtctgccagttccacagcataataattgggggacgcccactccttatcatgtgagtaacgcgaacgatagccttgatcgggatcttcatgagtaccgggttccagtttcatttctcccgttccggggataaacagaaagtcgcccaagtccggaatacctgttccgctcaagtgcgtcaaactgaatcccatcaatgtcagatgattgtatttgtatccggaagctgcatcatagaagcggctgtccgtatcggggcttatctggattcccccgaaaggaatctgtgcaccgggataaacatttccataaccatccgtaccgacaaacgggttcacgtagtccgtcagcttttcagtttgagccatgcccggcaagatactcaccagacacgaccaaaccaaaaacaacctttttctaccaactttattaaccatatccaatcgtatattacacctgtatatcacctacggcaacctgatattcatgccatagttcatctatgctatattccgttcccaagatatgcttgatagctccgtcaaacgaccagggaatcacctccagtgtgctgcggttaaacttacgcaggaattcaggatctttattgtcgcgcaaccagacgaagaaataacctgccgtccgataaccgtccatgtagtttcctcctttcggacgggcattcggtccgtcgaatccgccgttggctacacgtacggcatctgccattccttcaataaatgcccagaatacacgattggttccgtaagagccgatgccttgcggttccagctgataggcgtgtgtcagttcgtgcaacagtaccccacgcgtttcgaagaacagctttgccgtatcgttttccgcaaatgatttctcgatatgccgtgtgctgtagaagatagtaacgtctccattaccaccgcctttggcagaaattccttcgatgtcttccagtgtataatgtatcttgttcaccggagttatgctgtcttccggtgagttataaagagtagccaatacagtgcgtgcctgctctttgatataagactccgcatccggaatgatccggtgataaatgtccgaaccttttgtttccgaagctttatcttcgaacaagacagttcctacattgtagcttttccatacgtccggttttgcttcggcttgcttcttcgcacttgccgcacaagctcccatgcccacaatcagggcaattgcatataccaaatgtctctttttcatattcttttcttgattatttattgatgctgttaattgattccattagttaatgaataaggtttgtcctgcaccgatactccacgacgtttgttgggcgatgccgacattttaaattccaatacgcctcctttcaggatatcctcgtgtgtgatgtacattttatcataagactcaccgttcagtttcagtgactgtacataacgcttcttgtcgctgacgcccggcgctttgatttccagtgtctttccgttgggaagtgtcagcttcagatagggcagatagggagcaccaaggacatactggtctgtacccggacaaaccggatagaagcccatcacagagaaaagataccatgccgacatctgtccgcaatcatcatttccacccagtccgttgatgtcattcttatacatcttgttcaggatttcacgcagccagtactgtgttttccacggttgggaggtccatgcgtacaaataaggtacatgatggctcggttcattgccatgtacgtatccacctaccaggcattcttccgtaatatcctcattatgttcatagtacttctccggcagatgcatggagaagagttcgtccagtttctgtacgaatgtcttttctcctcccatcaggtcgatcataccaaacacatcatgcggtacatgaaaggagaagttccatgaattaccttcgataaagccttcgccgtaagtttgcaacacatcgaactcttttttgaatgtgccgtcactgtagcggggacgggcaaaaccgatgcttgtatcatagatgttacgatagttgagagcacgtttgcggtaagtatccgctatctctttattaccggctttcaaggctgtctgataaatagtccagtcgtcgtatgcatattccaacgtagaggaagctgccgtaccactcttgtccagcgggatatatcccagcttcatataatcggctacaccttcatagtaaggtaccgtagatgtgctaaccatcgccgataatgcctcatccacatttgaaaaaactcctttggttattgcatccgccagcacagacacagcatgataaccgctcatacaccagttctcatttcccatcaggctccatatcggcaacatgccatgcacgctctgctgttcatgtttgatcattgattccaccatatccgcattgcgttccggtttcaccaggttaaggaacggatgttccgcgcgatatgtatcccaaagtgagaatatagtatagttagtgaatcctttcgcctgatgtatgttatgatccagaccgcgataggaaccgtctacgtccatatacacggacggattaatcatggtatgataaagcgaagtgtagaacatcgccttctgatccggtgtaccttctatttcgaaatgatccagttcattgttccagtctgtccgtgcagcttccgccaactgttcgaagctctttccggaagcctcggcacgcaggttctttacagcgccttccgtgctgactgccgacaaggctacctttacaaccagttcgggatctttggccgtttcgaagttaaagtaagccacgatctttcgaccagtgatttccgggaaattcttctccagcttgaaacgacgccaaaagccattgtacaataccttttccttatccttatatccgtaatccttgatcggctgtgacaaggaaatggcaaaataggtataattcgtacgtgcccatccgttggtgatgcggtatcctgtcagcaatgtatcgttttccacccgcaggtttgcccacaatactttgccgtcataattatagataccatgcaccaggtccaggatcagatgaccgtcttttcctttcgggaaggtatatttatgtacacccgtccgttgagtagctgtcagttgcgctttaatgccatagtcgtccagcatcacttcgtagtatccgggtgtcgctttctctgtggcatgatcgaagcgcgaacggtaaccctcttccggatggtccgcccgtccgggattcaattttacatcgccgacagcaggcatcagcaatatatctcccaggtcggaatgtcccgtgccgctgaggtgggtgtgactgaaacctacgatggttttatcccgatactggtaaccggcacaatattcatacgcattcttctgataagctccattcacattatgtggaattgtgtctgtgtccggactcagctgtacccatccgaaaggggtgcaagcaccgggaaaagtatgccccataccattggttccgataatcggattaacgtaatctaccggttgctgagctacggcggacaaggttaccgccgccatagtcatcatcaatactttctttttcatcttattcatacctgcttacttgttatcacgagagaaggaataggggaagtcggattcgttaatacctcttcctttattcggtttattatccatatcaaataccagacgtccgcctttcagcaagtcgaaatgattcagataattctttgtatagttcttaccgttatagttcagcgaacggatgtaacgattggcatcactatttttaggagcggagatttccagtttcttgccgttctccagtgtgatcgtcgctttcttgaaataaggagcacccatcacatattcattgctgcccggacataccggatagaagcctaaagcggtaaacacataccaggcagaagtctgtccgttatcctcatcaccacaataaccgtcgggagtggcaaagtagaggcggttcatcacttcacgcagccagtactgtgctttccagggctcgcctgcatagttatacaagtaaatcatgtgctggataggctggttgccgtgcgcatagttacccatattggcaatttccatttcacggatttcatgaatcacacctccgtagtagctatcatcaaatatcggtggaaggttgaacacagaatcgagcatactgacaaacatctttctgccgcccatcaaatcggccagtccctgtacatcatgaaatacagaccacgtatagtgccagctgtttccttcggtaaaggcatccccccacttgaacggattaaaaggagtctggaaggtgccatcggcgttcttgccacgcatcagttttgtttcagggtcgaacaggttgcggtagttctggcttctgctcttatagagttccagttcttctgccggacgccctagcttttcacccattcggtagatgcaccagtcatcgtatgcatactctaatgtacgcgccgcattctcgttaatctttacatcgtaaggcacataacccagtttattataatattcgtatccacggcgccctgttgtagaaactctcggatgtacactgttggctcctttgagcaaaccttcatacattttctccgcatccgctttggtcacattcttcataaaagcatctgccactacggaagccgaattgtttccgaccatacagccacgatgtcccggactcgcccattcggggaagaatccgctttcaagatatgtattcaacagtccttcctgcatcttctctcccattgaaggatatatcaaattgacaaacgggaacaggcaacggaacgtatcccagaaaccggtatcggtaaacatatatcccggacggatttcaccgttataagggctgtaatgtaccgtttcacccttcgcattcacttcgtggaacatacgggggaataataccgaacgatacagacaagaatagaaggtacgcatccggttctcatcatcgtcttcgactttgatacgtcccagtacgtcattccaagctttacgtccggcttccttggtctgttcgaatgtcttgtttccgatttctttcagattcagttccgcctgttcggggctgatgaatgaggaagccactttggcatgcacctgctctcctttctttgtcgaaaaaccgatggcagcacctacgtgattggattgcagttcaagatgcgtctctaccaaatggtagtccgcccatactttattaaatgtaaaaggcttgtcgaactctatcacaaagtagttcctgaaattctgcggaacaccgccactgttacgtgtcgtataacctacaatcttattttcttcaggaatcaccttcacatacgaaccacggtcgaaagcatctactaccacataagcatcggacgcttcggggaaagtaaaacggaaatacgcacaacgctccgtcggggcaatctccgttgtcatgttatactctgacagataaacactgtaataataaggagttgctttctctgccttatgcgaaaaccaggaagcacggctgtcctgatcaatcttcagctgtttggtcatcggcataatggagaactgtccgtagtcattgatccagggactgggctggtgggtctgcttgaaacctctgattttgtcagaagcatacgtgtaagcccaaccgtcccccatctttccggtctgcggcatccaaaagttcatcccccaaggcagtgcaatggcaggataggtgtttccgttggagagcgaaatcttggagtcggttcccatcaggggattcacgtaatccaccggctgcttttgcgcaaagatagaggagactcccaacaatagagtcattgtgatagacagtagtttctgtttattcatgatataagagttaaactattaatattagattagcgagtgttattattcacgttacaaattaacgcaatagaaaattaataactatactctaacgtgacaaaaagcacgtccgggcgagaatgtcagagtagagaactaggagtcaaacagagcacaaattaaattactaataatcaaataattgcccataagaaaatacaaatagagtacaaacaaaaacaaaagcaagaaagtaatcgagattatgttctgtttactttcttgcttttttcaaagactggttacttcttcattctaaaccaacgctcgcctgtagcacttagcacatacaccatactgtcgttgtcatcataactccaatagaagccgtcttccgaaacacagaaagagaggaatttactgtaatcctgctgtacacggttataatcagccggattattattccatccgaataaatcatatggttcgcccaagctgatgaatatacgaccagtagcattatctgctgtcatagtaaccgcaaagccaatataagatcccataccactccacggacaagcaatcaaattcctcggattacgatcatcaaactccacaccagagtggaagattcccttaaagtctgcatgaatctcatcctgatctactatatgggtcttccaaccatctgcataccatgctgcaatatcagaggctttccgagtatcacatacaacattagcattgtcagtttcaatttcaccattcaaatagttgtaatagagtttatttaaacttattccatctaccgtcacattgctacccaaagtcaacactgcattttcatcattcgttgtatcaattatcatcggatactctgtgtgttttaccacaccgttatctattgcagaaatcttcactttccaattattgctctcgtcgcaaataatcaaatagtgtgcaaggaaagaagaggatgacctacgaaatacaccattattcaactctcccttaagcaaatccatggcctgtgctttattataagcaataatggccaatcgttttctctccttagcttgttgcaaagctgcagttgagaccggagtcaagatcatttctttgccatgcgtctgtcctacagctgtaatttgtgaatcagaataccccgtaatgacaaatgtcgtctccgagttttcgttcaaatattgtagcattcctccattcagcaaggtaagcaacaccgctttttccccctggaaatccagagaataatctgttccaacctcattcttcaacaacgtttcgtctgaatccgatgctacatttccttcttcatcaaactgaaagtagaacgttactccttgataaatcattttccatccgtctgccgcacacagtagttcttttacctctgaaggacgcaagcggtctgcactcatgtcaccttcatgttcccagtctttccaaggttccgtcatgccacaactataaaaaaccaggcaacacaacgacaacattatataaataagtttcttcatgatgtttttcttttaagatttgaaattagaaattaggtatatatcctcccaagtccggtcccactccataattcttggctgctcccggcgcacaaatacgtaagtcaatcatcggcggaatccgtccgtcatccttcactttcatcacaccgtcggtagtacctccccaaggattccgcatcttgaaaagatgagtattatcatccggcaagataaacgtaaacgcatgcccactggtcgtctgccaattttgatctacctgttcaccgcttcttgtaaaaccaccgatcaccagtctaccctgtttgagcgacacttccaccgcgcgttgtaagtcttcggcaatcaatgcatttgcaccgaaacctacactttccccgtcgccggtaaagatagcagaaacatattcagtaccaataccaccgacattagaactaccttgatagatctgattccacttaatcatagccttttcgagaatcgtagcccaagtgacttctttatttctgccgcctaaggcacctaaatcgccactattaccgataaaatagtcgccacctacaccaactgatatttgttttcctttcgggtcatacatagtaactgtgtatgttttgtccatattatccttgataatgtgttttacgaaacggggatagaggtatgccatcgaagcaatcaccgcacaagcacagcagtcacctacccaacgctgatttacatcagacatcacaggatttccatttggataaatggatacaacattgaatgtattccaagccatcttcgtcccaccatctccaaatggttcaggttcttcagcaggatcggcaagccatttcaagtctgctgccgtagcttctctgtcattctcatgctgtctgcccatcggagttatcgcactaaacgtactggaacctttactagcaatcaagtcgttgatattctccgtatatgaacgcatggccaccagtttccattcagctatctgcgtggcagcaccaccattgttcgcttcaacagaaagtctgtagtaacgataggaagttgcattatccacttcatagcttttctcttcttttctcgctgcaaaaagttggtttgtctgcgcatccagttctgtccacgtagtattatcattagaaccatagagtgtccaatctttcgggtccatttcgggagtatcggcagccgaggtcaacgaataggcagtgacagccttactactatttccattccaagtgatgttgaaactactatgataagtaacatacttcgtgtcagcattatcgtctaccaaacgtctgatttccgaaccgacaggagcatcagcatattgcgctataattgtaccactggagggcatattcgtgttacccgaaccaagtacataagaaaccggagcatcttcgttcggaccttctcctccattatctccttcatcatcgtcggacgaacatcctgccagacaaaagggaattagcagcaccaaaagaaaaatgattctcttcactgcattcacatcgctacatcttatttgaggtatcttcattgtttttcttttcattaatttctttcattcattcgcagatcggacatccggagtatattactccgttgtccatcccagattttgtaccatcttcggattacgacgtacatcttcgtcaggaatcgggaagaggtaatgtttaggcaaaaatgtacgtgtttctactactaccttctcaaaaaatgcaggagcatccgaacggaaagccataccatgaataggtccgccttctccacctctatgatatttaggataaatccaatcatcgcctacagccatatcggctactttccaacgacgtacatcaaagaaatgattccattcgaacatcagctcaaccaaacgttcacgatgaatacgtttgtccactccgtcacgtgtatcttcataaggaatgcatgcaaatccattatcgtccttagtacctaccgcaccatatccaggaataccggcacgggcgcgtatcttatttacatacttaatcgcttcattacgttggtcacaagcgctcaacgtttcagcataccccaagtacatgtctgccaaacgaagcaaagttgcacaatgcctgttagccccgctacgtccttcttttgaagccattttacgcataccataacccgtgtaaggggcatcccaattggcattagcataaccggaattaccgttataagtcagttctgtggttatttctccacgcggagtatctgtcttcaaccaagtagaaccatggaatgtaatgttcgtataaaaacgcggttcgcgattagcccattgtttcaatgtttgattcgaattgctcttgaagtaggttctggaaggaactacttcgtcagtatagtcactcgaccatcccaaatattcattagaaggtaccccctcatattccttatagttcgtatcgtcaacaatccggcgaccgtctttcataaagtacaagtccaccatttcctgaggtacaccaaatcccagaccacctctcaaagcaccattattatcatcgtaccccttgtgataaggcgtggtttcgtaagcccggtaatcatggtctgccaagcgaatgaaaatctgttctttattctctgtaccgtacaaaactcccgatgtcacttttctataagattcatagaaatcaatctttccatcggctgtcttctccgtatataaagagaaagtgttaccgtattcatcaaagaattctttgtaagcatcacgtgcagcctcccatttcgctttttcctgcgatttatcttgcggaaagagttgcttgccactttccggattaacgatggcggcataatcgggattacaattgaatagcggacttgccgcatacaacaacattttcgctttgaaagctttacatgcagctctgtctatacgtcccaaattggatccgtcatatctatcaggaagctcatttgccgcatcatcaaattccttcgccataaaagccacacattcatctaccgtattacgttctttcagcagttcagcagtagaaatatccaatggaattggttcttcccccaaaatcacaaatgggccgtaggaacggaaaatcatgaagtaatagaaagcacgcaaagctctggcttgcgctttccactgtttgcgttgtgcggccgaagcttccaaacaacggtctacattcatgataaatgtactggcacgagaaattcctttataatactcgatgtaccaaaagtttatccatgaggaacctgcataggtggctccggaagcccattcgctaccattatttccgtcccatgaaagcttacattccaacgaaccggttgtccagatccccgacatcgtattccttgcagaacgttctaatgtttcatcgggcacataattatacacgttattcaaaaactgttctgtcttcgagcgattagtaaacgtatcctccaagtcatattgttcaccggggattgcatcgaagaaatcattgcacgaactaagtccgaccaccaaacacagcgccaaagttcctattttaaatatatttttcatatccttcttgctaactgattattattaaaaacttacattcacacctactgaataagtacgtacattaggataagcagtaccattattggtattcaactccggatcccataatttgaacttagagaatgtcaataggttggtgcccatcacataaatacgcgcactcttcaggaatgtttgattaatcaacttcttcgggagttggtaagcaatagtcaactgtttcagacgcaggaaactgacatctttctgccaccatgtgctggttttcatattattttgattcgcattgtttccatgatgcaaacgaggatagaatacatcctgattagtcggattgtcagcagaccatctgtcagtaatgtttgcaaacaagttcgtaatacctgaaccatcattaaaaggatacatggcatttcctcccaaacaacggtctgccttggcatttccggcaaagagcgcaccgacagagaaatcacctaattgtaaatctgcaccgaaaccataataaatcttaggtacgtccccctgacctatcagacatttatcataatcgtcaattactccgtcaccatttaaatccttatatttgatatcacccactttcgaaatctgtcccggatgcccttcaccaaactgcttggcatggtccatgatctcttcttcactagtgaataacccttcggcgatccatccccaacgtccgttcacgttcgttcctcttttttccatccacggatactgtacccggggatcatcgttctctataattttatcttcattccatgagaagttaccacggacagtcaggaaacatttcttaccgagttgctgtgtatattccaatgtagcttcaaaacccttattgtctaccactcccaaattagcataaggcatttctacgaacccggaataatcaggaataacgcgtcgggtaataaagatgtctttacgatgttctttaaagatatctaatgtcagcgaaagattgtctttgaaaaattttaagtcaacacctaagtcttgcttgcgggaagtagaccaaccgacattggctccgtacttgctgaacccccaaccaccaacaccgttattctggtcgccaaaacgataaccatctacgctcgccatctggtctaggtacataaaacgccgtcctgttacagcatccgtaccaactaagccatctgtataacgcactttaaagtaagaaacagtttcttgcaaagattcccaccaagcctcattagagatagcccagccaagaccaaatgcagggaagaaaccgaaacgtttttctggactgaagttctcggaaccattatacccaaggtttgcctcgaaaaaataacggtcgttccatgagtaagtagcacgggcggccaagccttgttgcttatagggcaaagaaccgatcagattatcagaactcgaacggtaaatcttttggttataaagcaaaagaccacctatccgatgcaaaccgaacgaacggtcgtaatttaaagaagcttcaaagtaagtacttctagagtcggaagcgccctggtcaaatgcaagatctttatgtcctgtataggtcagtgcataccgataattgccatctgcatcaaatacatcatcattccacaatccgttttcgtctttagttccggcaaaattgtaagtatcttcacgcttgttatacttcaggtcacgactgttatgcacgtcgaaagccaacatggcagaggcagtaagccctttactccacttccagaaaccaaggtcttgcgtcaaacgaatgttggagttcaactgatttcttgcttcatttttgtaaccacgacgagtcaaatcggcatacgggttacggaggtcaccattggtagagatacctggtacagaaccatcaggcatcattaacggcaaatagaccggattaatctccatagctgacgcaaacaagtcactggtagattgctgcggatagttacccatagaaaggaaaccattgaagcccaaatcaatagtagtcgtttctgttggcttcaagttcaaattagcggtataattgtagcggtcgtaacggatgttagcatcatagttctccatttcagcggtacgtgtcagacctttttcattataataactcaatgaaacgtagtaagtggcattaggtacaccaccacgcacacttacatttacacgacgattatgtccccagtcattgaataattcgttcatccaatcaacgttcggatacaaataaggattgaacatcagtggattatcattcggtagtaatccatgggctttcttcgtagcctcaatatattgaggagaatataacatactgcctctagtatccatatacgcttcattggcagcatccatatacgtaaaggcatccgccatttcaggtttctttgtcaatgtcacaaaaccttcatagtagtctactgagaattgcggcttgcccaccttacccggtttggttttaatcagaattacaccattagcaccgcgtactccatatacagctgtggcagaagcatctttcagcaccgtaaacgactcaatatcttcagggtcgatattattgaaactacgttccacaccatccaccaataccagtggtttagagttctgacccgccagtgtagaaataccacggatccaaagatcggaatcatcatgccccggttctcctgaacgttgcacagctactacacccggcaaacgtccagcaatagcagaagataaattagctgtcggcatctttatatcttctattttcatagatgactgcgcacctactaccgatactttacgttgatgtccgtaagccacaactaccacttcgtccagtgacgatacatcttctgcaagaattacgtccagcactttctgtttgcctacttttacctcttgtgatttatatcctatataggatacgataagaatgggattgttactcgtcagtttcagattatactgaccattggtgtctgttatggtaccattcgtagtacctttttcctgaacgctcactccaatgagcaattcgcctttttcatcagacacacgccctgttacaggagtaccttgtgcccacactactgtactaaatgttagcagtaatgccaatagccacaatgtctttgtgtgatgtttttccatttcaaacaaattcatgttactttgttttttttaattaatactaaggttatcaatcgcctatataattcttataagcggaagcaaattaaaaacttttaatattaagaatattccgcagaagtgacaaaattatgtcaaaatgaaaatgctcatttatagaacagaaaggagaaataaagcacattataaacatctatatatcaacacatagcattcattcatgcacaaacagagcacaagtttgcgcacattgtatcaagttataatagccgcattttcgccacttttattaaaaagtttattcgtaagcagtaataaataaaatctatacagacatgaattcaaatatacctatcaccccaaacgaccaaagaacagaaggaatgaagaaaacccgaatcattaaccgaaagactttgaaaaactaatttcttatcagtccaaattcattcgttctactgtagtttccctttcgttccactatagttggacgcaagaagcactatagttcctcttgcgcccaactatagtggaacgaataaataagaacctcgaaagacttaattatccggaattactgatctaaggattcgggtaatacatccataaaactcaattagtaaagaataagatagtggggatagcattatcggagttgctcccgataatctttcggcgtcattccgaatcggcgggtaaactctttataaaaataggaacggctggaaataccaacttcagcgataacatcctgaatagaaagttcttcattctgcaacaatcgtgcagccttctccatccgataactctttatcaagtcactgggagccgcattggatatttctttaaacttgcgatagaattgacgcggactcatcgccatacggtcggcaattaaggttgatcccaattcttcctggtcaagattttgttctatcacttgcaacagtttccggataaagtccgcctgttcttctgtagtacaaacaatgcgtccggcccagtcaccaagctcttccatataaatctgctttgcctcccgagtaccgtaaatagctttattgacggcttctttcaaaaatataatatcataaggaagtacaatatatgaatcagcccacataatcaattcgcgctgaatggacgaacttactttccaacttaacattggaataaatgccgttttcgaaagttgagtacgattcttattcacatattccaggaagtcactctctgcttttgcatacatcaacatatcaactagtaacaaagcaggagccgatctacgtatttcttcaaatgcaagttgtacacttttcaccggacaaacaacaaattcatctgctaagagatcacttatcagccataccatttcatccctatcctccagcagaagaaccgttttcttcccatgctcttcagtctccttgatgatagccggttcaaaggctaacgtcaataaatgatccttttctctgtcggcatagtgaagcgtgacatttagctgtctcaaagccgcttgcacagaaaacagtaattggcgggtagttatcgcctcttctgtttccttactatctcttcttccctcttcttccgaaccggaaagttgcttatataattccttcagagtatcatctacggcagagaactgcagcaacatccgtccttcctcttccttcacatccactacaatatccgacttatgttttactccgccaatataaaggtaacaccaatagagcatacagcgtaaagcattcttataaacaggataaacaaagtgttctggtatagcaagttttacagaagatatatcaacgccctgtccttccaacacatgcaagacttctatagagagctctttcatgcacatacaaccagtaatcgcatattccgtagggaaaaatgacttaagttcctctacagccaaagttcccggacggaaaagagttgcaataaccgtctcgtgtacctgctccataattctgagacgctgttcataagggagattttccgcacgcaactgatcacaagaacgataaatggacgtaaagcgattcagtaactcacgattaagactggcggactccggtagagcttcattgctttctgctgtcaacagccgctgcatcatacgcttctggagaaaatattttcttaataaatgaatcagataaccggctattaatatgaaaaacagcaagtaaatgacataggctaccgtagaaagataccaaggcggaagaatgtacaaagggatagaaaataccttatattccgtattaaatacatctttcttataacggacctttaaaacatagctacccgaaggtatttctagatacgatgcttcatttatactactaaacgaggtccagtctttatcaaatccgtccagcatataggagtactccacatcacctccagtaagaaagtctggaacaacaaaagaaagggaaaaagaagccttcgctcctttaaaacttaacgctttgccaccatcggtataataatcccccagattaacctccttacgtccaatcattagcttacgcaataatatgttcggatagaattccggagctgtcgccacttccttatccagataaagcaaaccgtcaatgcctccaaagaaaagacgtccggtataaggacattgataataggcatcatcactaaactcacccacctgcacaccggcggcataataataagcatgcgaagaagtgtttttgggattatatttaataagtccacgattagtgccaagccataaaaaaccatttgcatcctccaatatgccatgaatcatatcattaagcaacccttgttctctaccgatataggaggcactgatttgttccttattaaaggtcaaacacactagtcccgatgttgttcctacatacatcctaccatctttagcacgatgcaggctaagtacatcatcaacagatttatgcaatatttctttcaaagaaatgactttatattcttctgtctgtttatcaaatcgaattaaccctttttcccggcttcccaaccaaagaatggaatctccttcagctaacataggataaaacatggttatctctttttgttcataaaagaaatgataacgcttttgcgatttgaggtgaatctccccttgtttcctctccaatatcaatttacgaaatccgaccccagccgtaaccgcatagagtacgctgtcattctcttcatagatatcatgtatttcgataacaggatctgcagacttatcctcaacacaatgcaaggctttatctgcaaaagaatagtaaaacagtccgggattacccgatcctacccaaaagccatccatataacggctttgttttaatgagtatgcttgaaactctctattccaacgggtataagatgaggcatcctgcctgcctactggagagtaaactgtagtagcagaagcatccataccaccttcatagtcatgtacatgcaaaagtccatctcctttcgtaccaaaccataatccgccatatttgtctgtcatgacagaacgtacctgccgacttagattggatgatagtttgctaagcatcagattagtggctatcgagtacttcttagcgtacatgacagctccctgcccatcagaagctacccaaagaatattctgatgaggatcgcggaaaatatcatatatacgtacattacggtccaccacttcttcttcatattttttcgaggtgcgcaaacgtactaaaccattggtttgaaaagcaattataatgtcttcataaaaaggaacaattcccacaactttcccatatcgttgcaccaacgaagaaaggttacgaatatagattttagaccttctggaaatatcatatacataaagatcccgctctgcatccacaaaacagagaatgccattctgataaaatacattatcgataggttttgcatgaaaatcagaagatgaaacagtaggatggacagacaatgtatcccggtcaaagccatctaatgaacattgaatcagactacctgtattccgtggaaaagtccataagacaccatcatccgtgacaaaagcacgctgatccatattctcgacaggagtctctatatttttgagatggacaaactttttatgataagtattataataaaagattccttcatcgcttactacccaagtatctcctttcggattggaatgcagataataatcacctgtaaaatcataatatcccactacctgacgcgaatcttgcgaaaaacgattaactcccaaatgtgtagtaatccacaaacaactgctatctgcctgctgaatagaatgaatgacattgttactcaacgtctttttcattgagaaatcagaacgaaagacctcgatacctttcccatcataacagttcacgccatcataagtgccaaaccacatcagccctgctttatcctgatagaggcaaagcacagcactattagaaagcccttgttgataatcgactttccgaaaaagataagcatctttacccgcatcagcccaacagaccaacgaactaataaatgtaaaaaggcataatatcagacatcttctcattatattaatagcaagtgttattgttcatgtcttattagataaagcgggaacaaatatactaaatataatataaatgagacattaataagtaagaaaagtaacaaaagccatcggatagaccattagaaagctgatacaaatgtttggcctaaatccaaatattattctacacgcaagtcccacaaaaagggaagtacgtacgtacgataaagagttggatgaaatagaatcaccatcaaaaaacacgactttacctgatggtgattctatataaattcaatgatttaactctaagataaattcatcatcttctctcacaatatactccgaactctgcaatggaagtagtaccattagagtttaagacagtcattcgtaccgcatctccccaaaccgtatcgaaacggtggattttcacacgcagaccggtaggagccttaccttcgtacaggggtttccatgtaccacccgtacggtattccagacggtattcctgcaaacggtcattgttacgatccgtaataaccaccatattgaaaggtttctcgcgctcaaaagtaaccgaataccagggcactttcacttcaggatttgaattccagcaggtcccgaaatcatcgtcattggcaaagtccatgatagcatagtcactgctccatgtaccttcggcaggctgatatttggcaatgttggaagaaataataggagcatccgcttcgggaaccattgctacacgaccgtcgttcttccacagtttacctatttccttcagagctttcaaggcgttggcatccatcaagccgtctctgttgggagccacgttcaggataaagttacagtaggatttgcccatcgggatgatattatcattgaccatttgtgccggagacttcacaggggtagtcgggaaactttctttccagaaccagttctgctgtaacggcaggcaagacaaggcaggcagacggttggtatctttcgagatatgctgtccggctccttgttcgtaagacttgatgtccgtgtaaaacaaagcctcggcaggatatttcgccgcattcagatccatcaccagacagttgggctggattgacttgaccagacgataaatatcttcaaaaggtacgtcatcgtaagagatacgtgaccacggggcatcccaaccgtcaatgatcagagctgttatttcaccatagttggtcaacagttcgcgaagttgctccttgatcatttcgatatgctgcggagttatacacttgggtcgcagccgggcatgcgtatcgaggatcgaataatagagcatcactttcatcccttcggcacggaatgcgtcggcatattcttttaccacgtcacgtttgaaagggctgctcattacactataatcggtcgttttagtatcccatatacagaaaccgctatgatgtttcgttgtcagacatccgtaggtcatgttggctgattttgccgcttttgcccattgtttgcagtccatcctgacagggttgaaaagctcgggagcagcatccgggtccggccagtcctcattaaagaaggtcggcatgttgaaatgaatgaacataccacagcgtaaatcaacgaattcctgttgcagctggtgcaacgacttggtttgagcattcaggcataacaccgaagttatacccaggatcatctgtaaaaacagtcttttcatcatctatttatttattaattattaattaagtacattagtatcattagcttatactatcttattcacattcattctcagtctctctgatacttcatccacattccacctttcgaagtagcttccgtatcgggacacaaaagatagatgtagaatttatctcctgcactctgacggtcgtgacgaacaacaaaaagccctttctcattgaaccaagtatctatcaggtctttacagtaggcatttatctcggccacttccgtcgcattaagagtaccgccgccacaggtctgtccgctgccggatatgttcttaaataggacacggtctttatcggaattattcatcaggatgcttactccttcttcactgctcgggaaagcgaggtttgcaaaccaccatgtccagataacgagcggtctttgttttggacttccactccatccgtagtcataactcatggcatttatatcggcaattgttccgccggagcttgtagcctgtccgcctgttcccgcccatatttcatcgcaagcggcaccgtgatcctgcgcttttccgagtgtgaattttcctccggaagtcacatagtcgaagtcattgaccgctcccttgttggaggtcagggttacatttgacataccgtctaccgccaccgcatcaccggtgcaatcaatggctttgaaggcataagtggctccgttcaccgatttaatctgttctaccggcgtgtccagtttgaagatttgcccttctttcgtcagtttagattcataatattgcgtatgaccgttcgcatcgcttccatccttgttttcaatcgttattatcttgacagaaagatcattgacaccatttagtaccaagccataataaccgataaaattgccggaagcgtcacagatggactgattatccaataaatttttctcaaagagttcggtaaagtccgcttttgaagcaactttaccatcgatgtatgcctgtgtagtcggctgcagttcaatggtattgccggtagattcaccgtataagttcagctgcggcgcctctccttctgccggaatctctgatacgacaaacttggtatctgcaaattcacttcccagattttgcagatgcacatcgcaattctcaatatccagtgccacttccttgcctttggcagagaatgatgtttttccttctacagccatctccagaaagtccgaatccaatgtcactgttccatcttcatgaaactggaagtaaaactcgtgcccctgatagtcagctttccaacagccatcggctgtgccatacaatatttctttaacggaggaagccttcagacggtcaccatctccgtaacccacgtcattcaaatccaaggtattgcaactccaaaagctcgtgcacagcacagctaatgcaaataatactttcttcatcatagttgttttttaaaggttgctctattagttattttgcaggaacacttccacctctgtcttgtattcgttccagagttcttccatcgtaaggtccgggtagctctccttcaggatatacttcaccgcatcctccaggctccactggttggtcagttcgtccatcagcaccgtccacggcaacatacgcacgaagtcgccattataaagacgcagccagctcataaaagcaccggaagtattatagtcaacctgccagacaaagtatttatcactctgcggattccggtaagacttggcgatagcggcctgatactcttctttttgcgtagccagaatatatcctttgctcgctactttcacagcgtccggccatccttcctgatacccctgtcggtcacaatcctgcacaccttccatgatatattttccttgtttgggcatccactgcacgcagtgtcccatctcgtgcataaacacatgctgcatgtccggcagtttccaccacgcatcgttcggattgctttccgaagccggataaacaatacctcttccttcgttatgggtggggtaatctatcgcatacgctcctccggtctggtctttcttgataaagacccgcagtttgccgtaagggtcgaaagccagattataggggtcgaatgacatagccgcacaatccatataataccatttccggaactcttcctgagtagcagcctcgtctccgttacctatcagattatacaatgcagaaacgggacgtatctccgaatcactctcaaaggaaatctgaacttgtgtcgcctggctgtttttaaaatactgccaggcagcatagttcatatccacttgaagttcatacttatccgcctgatcgctcagattcgtccagtcacttgtctgccgggcaccgtcggcatctttgtagatagaacggaaacgaagttcctctacaccgtaacggtctgtaaccactactgtacgatatttactcagacgcagagtggtcggctcgttgccataatcccgccttttcacagtcaggttgccaaaatcaccgacattcgggatcatgacgcgctttatctttttgccggagagcagggagttgaattctacttccactcccacatattcatctctcttttcccagccagagttactgccgtcccacgtgaggtaaagttcattcagcacctcatcatatttcgcctctttgagaggggcagctgcgtatccggctacggtattcccgtctttcagtacaggctgataatctttatagatgtcaggagttgcgaagctgtcttcctcaccgtagcaggcagccagtgtcagtgagacaaacaacccgaaagctatatctttccaatgtttcataatcttcttgtttaagcgttattgttcgaatatcgtattaccatcctaagttttgtaccagtgacgggatacgacggaggtcatcataaggtatcggcatgaaatattgctttttcgtaaatgctacacgagtctcaaaagaggtcctttcgaagaatgccggataatccttgtccatattcataccgtatactttgcctccttcgcctccggtgtgatatgccggatagatccaatgctcggggtcattctgtccttccgccactttccagcgacgcacatcgaaatagcggttccattcgaagactagttcaaccagacgttcgcggcggatacggttcagcagatcggtctgtgtcttcggacaggttattttgccggctgttgcggtaaatgtatattcgggaatgcctgcacggacacggattttattcagataagttagggcattgtcgagatcgctgcacatacaaagtgcttcggcatatcccaaatacatatctgccagacgaagtaccggagagaagtgtttcgagccgttgttgttagaagctttcgcaccccgacggatcaagtatcccgaatccggacagtcgccggaggttttggacttgccgcaggttccgtttgcaccgttggtgaagtctgtgcgcatttcctcattgtacttaccttcgttcagccagatagagccgctataggtaatattcacataaaagcgcggttcacggtctttccactgtttcagcactttggacttatcggcgtcaaagtaaagacgggaagggttattggggtcataatatcttccggatgtgaagttgttggcgctcggtatgccctcgaatttgtcatagccgggatcttcttcgatggtcagtccgtctttcgtaaagaacaggtctaccgtttcctgtgttgtataatagccaccgccgccagtcacatcggtatcctggaagtcggtaaacttaggacatacccagtaggtatagtcgtacaaatctctcagcttcacaaaaatcagttcatcaacagcttcccaggttgtggtgaaaaactcgcccgcagccctgcacgaagcataagggtctagttttccattcgtatagacctcggtcagcttgtatccctgtccggctgcgaaggtcataaaccgttcatacgcatcgcgtgcctgagcccatttggagttgtcttcggtctgagggaaaagttgtttgccgtctttattcttgactgacgcctgatctgtatttccgttgaaaagcggacttgcccaatagaggtacagctttgccttgagtgccatacaagtagcgacatccatacgtcccaggtttgcctttccggctctctggagcaaatcgccggaatcaatggcgctctgcaattccgtagcaatgaagtttacgcattcgtctaccgaattacgttctttaatcagttcttccaaggaagcgtccaaaggaatgggatcttcgccaatcaacggaatgggaccgtaaaggcgcagcaattcaaaataatagtatgcccgcaatgcacgtgcttccgatttccactttccacgtgtagaggcggcggcttctgtacatttatctacgttctggatgaacgtacttgcttttgctattgcctgatagtactttgaaaagtattcacttgcctgagctgaagcggagttaaaggagccgttggtccattccgcatacgttttgttccagcggtttgctccgtccaaagatgcttccgtaaagatacctccgtaggtgttcggatgaatggcatctgtcacttcacgcacgtagctgtatacattgttcagatattcttccgtcctttgcttggaggcaaacgtttcgtccagtccaaactgcacaccgggaatcggttcaaagaaatcactgcaagcagtcagtccgacacacatcgatgcagccaacaggtattgttttattctattcttcataacgattatttgactttagggttaaaaactaaacttgactccgaccgaatagctggatacattcggataagctgttccattactcgagttcagctccggatcccacagcttgaagttagagaaggtaagcagattcgtacccatgaggtagacgcttgcacttttgaggaaacatctgtccagcagctttttcggtatattataggatatgttcagttgcttcagacgcaggaagctgacgtctttcacccaccacgaacttttctgaacattattcgtgttggcgtcactgccaacatacatgcgcggatagaacacatcctgattggtcggatcgtcgggactccagcggtcgtggatgttggcaaagacattgtcacggccttcgtcatcccagaaaggcttgatacaaatgccgtccagatagcggtcagcctgtccggttccctgaaacagggcactgatagaaaagtctccgatctgtaagtcggcaccgaatccgtaatagattctggggacatcaccgcgtccgatgacggtcttgtcatagttgtcgatcacaccgtctccgttcaagtcacggtatttaatatcgcctacatttactgtcccgaactgggtagcatggtcttcaatctccgcctgactggtaaagagcccatcggctatgaatccccaagtcgcatttacattcgtaccgcgtgtctccatccaaggatagtctaccggcggttcgtcgttctctataatcttgtctttattgaaagtcagattgccacgtaccgtaaggaatgtcttcttgcccaaccgttgtgtatagtccatcgccagctctatacctttgttttctacgacacccagattagcataagggttttcgatccatccggcgtagctggggattgtactgcgttgcaggaagatgttgtcgcgacgttccttgaaaaagtcgactacaaaggacagattatcattcaggaacttgatatcgatacccaagtcttgctttctggatttagaccaagtgacattcacaccatacttttcttctccataaccgttggcacttgtataattggttccgaacatggttcctgtcagaccggtgaacacaccctgatacatgaagcgtctgcctgttgcggtatcactgccgacccatccgtccgtatagcggaatttgaggaaggaaatgtatttgcgaaccggattccagaaagattcattggagactgcccatcccagaccaaaagcagggaagacaccataacgcttgcccggactgaagttctccgaaccattgatgccgagattgaattctgcgaagtaacggtcgttccatgaataagtggcacgtccggcaaaaccgcgttgcttgtaaggcataccgccaatgacatccgtcgcattcaaatcccaatatactttctgattgtaaagcaacagacctcctacccgatgagcaccgaaactacgatcatagttcaaggatgcttctgtatacaccgtgcggctgctccattgctccggtgtctgaagtgacaggctaccatccgcttctttcagcaccgagtagaggtaatcgcctgtttcttcatcaaacaaggtgtcttctatccagattccgttttcgtccgttttaccggcaaaggtgtacatcggttcattccggttatactttctcttacgtgaattgtaagtatcgaaagctaccatggcagaagcggaaagtcctttgctccacttccagaaatccaagtcctgcttcacgcggatattagaatttaactggctggaaaattcatcataataacctccgcgagccagcagaccgtaagggttgaacttttgctgtgagttgataccggacacggtaccgttgggcagcaacaaaggataaataaccggattcacatccatacaggctgcgtacagcgaactggtgctgctctgcggatagtgtccctgtcccagataaccggaaaaacccagatcaaccgtcgtcttggaagtcggcttcagattcagattggaggtgaagttataacggtcgtacttcatctgagtattgtagttctccagcttgaagttgcgggtcataccggtttctccgtagtaactcaatgaagcataatagtttgcattaggtacaccaccacggatattaatattcccgcgacggttgtgtccccagtcattgaacaggttatccgcccagtcgatggccggatacaggtaaggattatacaatcggggattgtcattcggcaataaaccgttggccttctttgtcgcttcgatataagcagccgaatatttaagtgtaccgcttgtattcatctgcgcctcgttgcgtgcatccatgtaaatgtaggcatctgccatatctactttcttggtcaggcgggtaaaactttcgtaatagtccacactaaactgtggtttgcctactttaccgggtttggttttcacgattacgactccgttggcaccacgtacaccatatactgcagttgcggaagcgtctttcagcactgtaaacgattcgatatcttcagggtcgatattgttgaaactacgttctaccccatcaacgagcacaaggggactggaactctgtccgagcaaggaagataaaccacgaatccagatatccgattcatcgtgaccgggttcgccgctacgctgaacggcaaccaccccggcaatgcgtccggaaatagcagaagacagacttgcagcaggcatcttaatgtctttcacatccatcgtagactgagcgcctaccacggatactttacgctgattgccgtaacccactactaccacttcatccagtgacgacacatcttccaccaaaacgacatctacgattttttgctttgctacctttacctcttgcggcttatatcctatataagatatgagcagaatagaattccctgttgaaagcttcaaggtatactgaccattcatatcggtaatggtaccattcgttgtacctttttcctgaacactcacccctatgagcagttctcctttttcatcagagacacggcctgtgacggaacttccttgcgcccatactgttacactacacgtaagtaacaatagcagtagccataatgacctgatgcgatgttttttcattccaaacaaattcatactacttgtttttaattaataataataaggttaccaaatacgtttaatacgttgacgcaaattaaaggaataaccaaaaaaatgagatactcctgtgcgccaaaaaacagagaagagaaaaaatgtctgtttaaagtacagatggtaaaatagagtactggataataccctatatatcagaataataaataatggaaaacaaaagagagtacaaaggataccaaccttaaaaagcagcacagatcagcatgggaatttatttcttggcaactaataccagaccgcttcctggctgttcactcctgatttttatgagtgtcattccctaaaagcttctctctatataccttaggagttacgccaaacttacgggtaaactctttgtagaagtaagcacgactggatatacctacatcggaaattacatcctgaatagacagttcctcgttctgcaacaaacgggcggccttctccatccggtaatctttaatcaaatcgctgggtgacatacccgaaatctccttaaacttccggtagaactgacgggaactcatcaacatttgttctgccacaaacgtggagcccaaatcttcacgatccagattctgctccacgacctgcaagaacttcctgacaaaatccgcctgctccgtagtagtacaaacaatagaatctgcccagccttccaggtcttccatataaatctgtctggcttcccgcttgccataaatcactttatggatcgtttctttcaggaatggtatatcataaggaagaacaatataagaatctgcccatagaatcaactcccgctgcatagacgcactgactttccatgtcaacatcggaataaacgctgttttcgacaacatagaacgattcttattgacatactttataaaagtactttccgcatcggcatacataagcatatccaccagaaataaagtcggtgcggacttatgcatctcgtcaaatgccaactgcacactccgcactgaacggacttcatactcatcggaaagtaacgcactgatcaaccagacgatctcttccctgtcttccaacaacaaaactgtttttctcacttcattctgctctgccacaacaaccggatcaaatgtgatagtcaactgattatcctgccctacaggggttatatagcgcatcacactattctgctgcttcaatgcagaaaacacgaaacgttgcatggtccgtatcctgaacatatcatccgaatctttcgccctgatagacaagagttcttctccggacaatacatccttcaatcctttcactgtttcatccggagaaacaaatgtcagcatcatacaacctgcttcttctgtcaccgtcaccgataccttctctgtcttacaactggaaatataaaggtaactgaaataaaggatacaacgtaacgcattcttataggcgggataagtgaaattttccggaatgtctaactgtatcgaagagacatcatggccttctttttcaagtacttgaagcacctcttccgccatcttcaaaagagacaaacgccccgaaaccgaaaaatgcagcgacgacaacaaacggaaacattcatcacccaacccacacccaaagagcaaggacatcacggattcacgaatctgacctattttctctgcatgtccttcagaggagatattcttgtcgtttagctgatcacaagcctgataaatgagagtacaagtattgagcacctcacgcgcctgataactatccgccgccagagatatatttcgattttccgactccagcagtttcttcatcatccgttcatgacgaaaatacttgcggaaaagatgaatcacatacattaccaatacgatacccaatagtatataaacaatgtacgcatacactgtgcgataccaagggggcagaatgtgtacgggaatcgtgaaggtcttgtattctgtagcaaacacatctttcttatagcgaaccttaaacagataatctccggacgggacgctgaaataggatgcttcattcacactgctgaaagctccccagtccttatcataaccttcgagcatatacgagtattccacatcgccaccactggcataatcaggtacaacaaagaataaagaaaacgaaagattggctccctgcatccgcagccctttcctgtccggcaaataatggtcttgcaaattgacaaatgtcttttctatgatcagcttacgcaataatatttccggataatattccggtgctgccgacaccttcttatcaaggtagagcaatccgtcgattcctccgaagaaaagacaaccggtatatggacaacggtaatatgcatcatcgctaaactctcctatctgaatgcctccgctgtaataataggcatgagaaaatgaattttccggattgaatttgatcagtccgcgattcgtacccagccacagcagcccgttggcatcttccagaatactatgaatcatgtcattaagcaacccttgttcacgaccgatataatccgcttccagtttgcgttctttaaaagtaacgcgcaccaagccggaggtagtgcccacatacaattgctctccatgccagtgcaaacagagaatatcgtctacagatttatgcagaatctcattcagggaatagatctgatactcttccgttttccggtcaaaacgtatcaatcccttttgcctgcttcccagccacaacagggaatctccttgtggcaccatactataaaaaaggttaagctcttgttgctcatggtaaaaacgataattcttccacgatttgatttgaacgtcctgcttactgttatctactattactttataaaaacctttacccgaagtcgccagataaaggacactatcgctttcctcaaagatggaatgcacttctgccacttctcctccagttcctgtttccctatttgaaagttcatgcaactttccattatcaaaagaataatagcacaagcccgaagagccagttccaacccagaatccattcctataacggctctccaacatggagtatacctgaaattccctgttctgcttgacatacgacatcgcattctgctttttatccagcgagtaaacctctgtgttggatgcgtgtaccccgtcccgatagtttttcacgtgcagcagcccgtctccctttgttccaaaccaaagtcccccgtatttgtcggtcattatcgaccttacctgacgggtcaaattaagtgagaaactgtttaacatcagattagtggcaatagaatacttcttggaatacataatggctccttgcccgtcggttcctacccacagtaccccttgccgggagtcattataaataccatagatacgcatattctgatcgataatctcctctgcatacttttgagaaagacgcaagcgaatcagaccattcgtctggaatgcgataacaatatcctcatagaaaggtacaattcccgttatttgcccatatttatgaaccatctcaccaatgttacggatgtaaatcttagactttcttgatatatcatacacaaaaagatcataatccgaatcatagaaacagaatacaccattctgatagcagacatactgtatctgcttggagtgaaaatgtgagggagtagtagtgagacgcgtagacaaggtatcctgatcgaaagagtttaaagagaaacgatacaggtcaccgctttcataagggaaaaggtataattcaccttcgtcggtaacaaacgcgcgaacatctactttcagcattttaatatcgggcatcggaatccgcacaaaacggcgatggtgggtattgtaataggcaatccagtcataactcaacgcccatgtattacctgcatggttggaatgaatcacgaaatcagtgtcaaattcataattgcagattacctgccgtgaatccttcgaaaaacgattggctcccaaatgtgtagttatccataagcaactgctgtctgcctgctgaatagaatgaataatgttattgctcagcgtcttttgttccgaaaagtctgaacgaaacacttccatacttttcccatcgtaacaatttaccccatcataggtaccaaaccacatcaatccctcattatcctgaaaaagacaaagtacagcgctattggacaatccctgctggtagtccaccttttggaaaagataggcatcctttacattgtcagctatgctaatcaatggacaaatcaatgtgataaaaactagaatcaggcgtattctcatagcattttggaaagtaatcagataataatatgcacaaaggtatattttcggtagcaaattaccaaaagtttttttcgccttcagcggttacaaacctcacattaacaaataggtatctcagaaaggcatgaaaaaagggaggactcgtttattagtcctccctctcttattatactcaaagctagttgattgctgttacttggctagttcattgattacatccataattttctgaccgatctcttcagcagcttccatggtcgaagcctcgctgtacacacgaataatcggttccgtattgctcttgcgcaggtgcacccacttatcagcgaagtcaatcttcacaccgtcgatgtcattgatttcctcgttcttatagatttcctttactttagccaggatagcatccacatcgatttccggtatcagatctacccgattcttggctatgaaataaggaggataagtagcacgaagctcgctcaccttcttcccttcgtgagccagatggctgaggaataaagcgatacctaccaaagcgtcacgtccgtaatggctggcaggatagatcactccaccgtttccttcaccgccaattacagcattcgttgctttcatcttggtgactacatttacttctcctacagcagaggcgctatattccataccgtatttgcgggttacatcacgcaaagcacgggtagagctcaaattagaaaccgtattgcccggagtatgcttcaatacataatcagctacagtaaccaatgtatattcttcaccgtacatgacaccgttctcgcagatcatagccaaacgatcaacatccgggtctacaacaaatgcaacatccgcttttccacctttcatcaggttcatgatgtcacccaagttcttttcaagtggttcggggttgtgctggaagtttccggtaggttcgcaatagagtttctctacatgtttcacacccagacgttccagaagttccggaaggataatacctcctacagagtttacacagtcgatagctacacggaaattcgctttcttgatagcttccacatctaccaggtcgagagccagtacgctatcaatatgtttttgattgtaagtcaggtctttgcgataagagcccaagtggtctacatcggcatagtcgaattcctcagcctcagcaatacgaagtacttcattgccttcttccgcattcaggaattctccatgttcattgagtagtttcagtgcgttccactgtttggggttgtgagaagctgtcaggatgataccgccacaggcgccttccatcgtcacagccagctcggtagtcggggtagaagccagatcgatgtctacaacatcccagcccattcccatcagtgtgccgacaactacgttttttaccatttcacctgagatgcgggcgtcgcgtcccactacaattttgttgctttgtgccttacaggtcttacgaatcaaagtagcataagccgaggtgaattttacaatgtcaagcggatttagtccctcacccgctcctccgccaatagttccgcggattccagagatagatttgattagagtcataggtcttttaactaagatttatatgggggttaattcagtgctttgctgaatgtccaaatatcataatagtatggattgacgtattgttgtgctgatgaatgtcctaccttggaaggaacgatcaaacgtacatgggcatagttgcgcacaaaaggtagtgcaagcagccagcctgcaggtactgctgttgattgataataacttgcccaataatagtccatttgtatgaaagtaccgtacacatagctgccttcggctacataacggaatacagcaggattcgtgtaaagctgatttgcatctccccactcttcgaggaaaacattgaaacaggtagtgtcgcgtgtcattatatcttcttcgatataacggacgcagatttcattgttgttagcgaaagtatccgttttgttctcagcacttccacgatctacaatctgcatatatacaccatcggagagggcaacgtattcattccggtccaaattggtgacagtatcattcttctcaaattcgtcctgtgaaatgatccggattcctttatctttgatgaatttattcaccgcattcttttcgtcctccaacatttcagcataagtctttgaatcgtcgcacgcctggaatatacctccggctgccaacaaagagagaaataaaaatacaagtttcttcattatctgttatttagctatattctgcacaaatgtatctcaaattcattgaaagatgaaaggagaaagttgaaagttggtaacttttaacctttctctgtctacttttaaccttccattcttagcttttggctgtcaacaaaggtttatatttctccagtgcctgttcgaaaacggctttcgcctcctctatcgttccgaaaaattcaccgcccgaagcattcagatgaccgcctccgttaaagaattcggctgcaagctgattgcatgggaaagtaccgaccgaacggagcgaaatcttaatcattggcttttccgtatcttcccgcaagaaacaggagaaacatacgttcttaatggtaaggggaatattcacaaacccttcgctgtcaccttttatatagtcaaacttactttgttcttcctttgtcagcgatatcaatgcggcattgtaatctgagtaaaccaccatatttgacaacacataccccatcagacgcaggcggctctctgaatatgtattgtatactttacggtagatatcatctttatcaatccctttggaaaggagttcgctgatgataaaataaatctcgcgattgttggaattgtaggtaaagccacctgtatccgtcatcataccggtatagatacattctgctccttcctttgaaatatcactgaagtagcccatacgacaaatcagacggaatatcagttcggaagtagaagatattttaggataagacatggtgatcttacagaattcttcaggataaagatggtggtcgatcatcactttgcgtgccggagaagctgccacggcatccgccatctcatcaatacgcttcaaggcattaaagtccaaacagcagatcacatcagcttcggcaatcaatttgtccgcaaagtccttatagcggtcatacaaaaggatatccttgctgcccggcatccagcggaggaaatcggggaaagcgttaggaacaattacatttactgtcttctcctgtgaattcaggaagtgataaagccccagtgaagagccgatagcatcgccgtcgggcgacacatgagaaacgattactattttgtcagcgcgctcaaaccacttggtaaagcggtcgatttttgcctgttctattactttagtcaacataccatattctttttcgagttgcaaatgtacgataattcttcgtacttagagcaaaaaccgcacagaaccttcttcagacagagtgataaaatgcagatgcagtctctcacattccttccggaagagctgtttgcgatcatcggaaagggaagcatccaacaggatacaagatggagaaaagagtccggtaagttcttccagacgaccgttatagcctttgcataagtacatataattaataaataacggcgaagcggcagatttgttccgccatcgattgtcggtcaccatacaaatacggcagccatgataaaatacaatctgctgatgacgacagaagtcaacgttctgacaatcagccgttacttctattggaggcagaagttgatgacgtctccaataattagccgctacagcctgcaaacggcgcttatcagaaagggtatcggcatagttcagccaagaagtcccatcctcagcaatacaatgaatcgccggacaaccacggacattgtaaaatacaaggctcggacaaggacggtcataccagcgcatgaccgtgtgataaatgcccaaacacaacaggcaggaaaggcaaacaacaagattcctgaaccttcgggtcttcgaataataaaggaaaagcagcaagaatatgtagatgcccaacacctccaaccgataaagccagataccatccaaggaagcattaggaagttgctcaacccaccggacaaaatcattcagcactttcaacaggaatcggactacttccgccataacaaactgaacggcaggcagcggagtcagaagaagcataagaacggcagcatacaaagttacagttaccaaaggtatgacgactaaattagtcagcagaaaatgagtggagaaacgggagaaatatagcattacaagcggagcggttcctatttgcgcagctatcgatacactcatcaatccccaaacagatttgcctatcctgctcttcactggcaacaactgacagaccggtttctgaatcatcaaaatagaaagtacagcgagaaaagataattgaaaaccaacatcgaacaaccaagccggattgacaagcaacattacccatgcggtagcagccagtgtattgagagtcaatgattggcgaccgaacagttccgctattgccaaaaccgagaacatacttaccgaacggactacagacggcgacagaccggtaaaaaaggcaaaagaccataataaaacaaggagcagaacggaacggaaatatcgccctgcctgccacttccttgttagaggtttcaaaaggaggaaaagcaaagcatacaaaagccctatatgcaggccggatagagccaagacatgactggcaccggatactgaataactttcacggatagagtcacttaaatcggtcttctcacccacggtcaacgctgaaagcacagccagttcatctccttcaaatcccagcttccgataaaggttcatcaccttttcccgataaaacatcgcagtatacctgatggaatgtagagaatcggaagaccgagaagcagcaaaaggagaagcctgggaagaaggatcagaggaggcagcagaatgagcaaaagacgatgacgaccctaatgcccattttccagataccacataccccgttccactaataccatgacgcatcaaatagcgagcgtagtcaaactcatcaaagtttcctccgttaacgggtgaagcaatgcgggcagataccagcagttcatctcccatctttagttgtttatcccccagcttcaataaagcgcccaatgaatctttctgcagataaagaatagcctttcgccctatcggacacacacctgatgaatctcgtagttcttcaagcaataccctacagagcaacgtccgttcctttgcctccggagtatccgttaatctcgcccgatagacagtttccttttccggaaagtcatatacggtttgttttaattgccaagtgatgcctagccacccacctgcgaaacaaagcgcaaagacagatattccaaaacaccaccgaagggagtggcgttttagaaaataaagggcaaaggatagtcctgcaaagaggcaaaagataagaatactccatagcagtttcatcgattcgtcgaacaaccaatcgccacaaaaaacgcctgctatccacgggataatcaggcgtatataaggatactgatggataaaattagtgttcaatttaaatcggaagtatcgtatatagatcgtatgtgattaaagctcatgtagctggcggatcatctcttccgggtccggtgctccgaaaacagcattgccggctaccagcacatccgcccctgcttccaccagtcgggcacccgtttccaaattcacaccaccatccacttcgatcaatgcttttgaaccggtccgttctattaaagcacgcaattcacggactttctctacagaatgctcaatgaacttctgcccgccaaaacccggattcacactcatgataagtaccatatacacatcctgaatgatatcctgcaatagagcaacaggagttgccggattgattgtcactgccggctgcattccagcttctttgatttgctgaatcacccgatgaagatgcgtacaagcctcatagtgaacattcattgtatgtgcgcccaacgctttcacttcggggataaacttctccggattgactatcatcagatgtacatccagcggtttgtccgtcaactttgctacatacttcaacaccgggaagccgaatgaaatattagggacaaatactccatccattatatcaatatgcacccactccgcttcgctgcggtttatcatttcaagatctctcgccagataaccaaagtcggcagaaagaatggaaggagaaataatcggtttcatcattctattgttttaagttctaagttagcttgaccgtggtcagttcattttatcaattcattttatatccatccgacaagcggaatccacgaagcaattcatcggtcttcagacgtttcttgccgggaagttgcaaagagaggacagaaacaaatccatcgggcacagccacctttatatatttcttgccatccgtcacaactgttccgacagccagctgatgtgcctcataaatcttctcgctctcaaaaatcttcatcaccaccgcttctccttccggactgactaactcactccaggcagcaggataaggcgacagaccacgaatgaaatcatacacctttttcacaggagagttccagtcaatccggcaagtctctttaaagatcttcggagcgggacgaagttcgcccactaccgccatgtcttcctgagcaatcggtttcaccgtatcattcaagatcgcatccacggtttcgagcaccagcttaccaccgagtaccatcagtttatcgtgcaccacttccacattatccgtgtcggcaatggggacacgtacttgctgaatcacttttccggtatcaatctcgtgttgcaggaagaaggtagtaatacctgtctccgtatcgccgttgataaccgcccaattgataggagcagcaccccgatactgaggaagcagcgaagcgtgcaggttgaaagtacccaaccgcggcatattccagaccacctccggcaacatacgaaaagcaaccacaatctgaagatcagctttccactcacgaagtgcctgcacaaaagcctcatccttcagtttctccggttgcagcaacggcaagttctgttcgagtgcatattgcttgacaggagaatattgaattttgtgtccgcgtccggccggtttatcgggcatcgttatcacgcctaccacgttataaccaccctctaccaactgacgcagggcctccaccgcaaaatcgggagtacccatataaacgatccttaaatcttctttcttcataatcttcttattatcttcgtagaagttatctgcatagtaacctagctccggcaccttgccggttaatcttcagaaaaatgtaccagtacttggcggtatgagttaaatatctttgatttggagacaaatccctgatatcgtccttcttcgtccactaccggcagattccatgctttggtatcatcaaacgtctgcatcacttgttccattccatccgtatcgaatatcttggcaggagcagatgtcattaatttattaacagtaaaacggtgataaagttcttgccggaacatgatgttgcggatatcgtcgagcaggacaattcccaacaattcgccggtctttttatccgtcaccggaaacatattacggtgggaagcggcaatagcttttaccaactctcccaagtccatttccggatgcacggctacaaaatctttctccaccacattctccatcttcatcaaggtcagcactgccttatccttatgatgtgtgaggagttgaccgcgcttggcaagacgcatggagtaaatactatgaggctcgaaagctataatcgttaaataagaactgacagacacaatcatcaacggcaggaacaaatcgtaacctccggtcagctcggctatcaggaacactcctgtcaacggagcgtgcataaccccactcataacacccgccattcccatcaaggcgaaattcttttcgggcagataggcggaaaaggcaaagtcattgctgaaatgagaaaacacgaatccggcaatacaccctagataaagcgaaggagcgaaaattccaccacacccgccgccaccgttcgtcgcactggaagcaaacactttcagcaagataatcagcatcagataaacctgcaacagattaccatagccgtagaacatagagttgttcataaccgtgtcccattccgctgccgaagttccgttcagcagaagttcgattgtatcataaccttcaccgtagagcggaggaaaaaggaaaatcagcacactcagcatcacaccgccaaaagcaagtttctgataagggttcttgagttttccgaataccccttcaatggagttcatcgcccgtgtgaagtagagagaaatcagtccgcagaagattcccagcaagatcacgtaagggatacgttccagttcgaaagcctggtcgaggttgaacttgaacatagcctccgttccggttgtgatataggaaacagttgccgcagtcacggcggaaatcagcaaaggaagtagagaagacatcgtaaggtcgatcatcagcacttccagcgtaaataccagtccggcaatcggggccttaaagattcccgcaatcgcccctgccgcgccacagccgacgagcagcatcagcgtgcggtgttccatcttgaaaacacttcccagattggagccgatggccgaacccgtcagcacaatcggtgcctccgctccaaccgatccaccgaagccgatcgtgatggcactggcaattgtagacgaccagatattatgtcgtttgatacgcccctgacgacgcgaaatcgcatacaggatcttggtaacaccatgactgatgtcatccttcacgatattacgcacaaaccatcccgccaggaaaataccgatcaccggatataccaaatacaaatagttggccgatgtcgcattaaagttgtttgtcagaaaattctgtatctgatgaataaggaacttcaaaaataaagcggcaatcgcagtgaagatcccgaccagaaagctcaatatcaggataaactgcttttccttaatattagcttcccgccatttgatgcaacgctgtagtaaactctgtctctcctctcttttcatctattcacgaattatcttgatcactccgcctttatctaactttataatacttgagggcttgggacggctcatatcatcctgtcggaagccgactatatagtccactgccgacttgacttcttcgctgatctcagtaaagttggccgctcccggctgtccgctaatattggcagaagtggaaacaatggctttacgaaattgctgacaaagtcgtctggagaattcttcatttgtcacccggatacccacgctgccatcttccgccagcaggttcggggccaaattccgtgcaccggaataaataatagtcaatggtttatcggctacttctatcaggtcccatgccacatcggggacatcctgtacataaaaatccaccttcacaggagagtctaccagtaccagcatagccttgctatcggcacgtttttttatctcatacacccggtgtacagcctcttcgttagtagcgtcgcagcctatgccccatacagtatcggtaggataaaggatgacacctccttcattcatcacctgacaggcttttttaatatcttctatcatttcttgaactatttctgttgagaataacacgcaaaagtagtacttttgcgtcgaaataaaaaagattaagggaaaacaatggaagaaatcgtatttcatcatgcactgcctatccagttgcgcttcaacgacgtagataaattcggtcacgtcaacaacactgtctacttttctttctatgacttagggaagactgaatatttcgcctccgtatgtccgggagtggactgggaaaagatcggtatagtggtcgttcatatcgaagccaattttgtaaagcagattttcgcatccgatcatattgccgtacaaaccgccgtttctgaaattggaaccaaaagctttcatctcatccaacgggtgatcgacacggaaacccaagaggtgaaatgtatctgcaaatcgatcatggtaactttcgacctggaaaaacatgagtcgatgccactaaccgaagactggatagaggcaatctgcaaattcgaagggaaggacgtacgcaagaagaaaaactgaaagaaataagccttccccggtgtcgggaccattcctcatcggtgcctgacttcggagagccaaaacctgagcgataagaaaagttttatactgaatcatgtccgctatataatagaaattacttgcttatacattatattatatataattcctctctccaaaagtgaacagcaaccatgtgaatactctcttaatgaacataaaggaagtttgccactttacgctctccttgatgatcatagtttctgttatcacagggaaagttcacaattccctcttccggtgcaccggacagccataaggcggtagagcctcccccatccagattcagcgcatcttttccacccaatacatgaagcagatgtgccaattccggaatgttgattccgacagcattttccggagatcgcccatcgacagtaacaaacagaatctttccttcttcagtcagacaaatagcactacgcggatgtttggtttctataaaattggcattgcactgactccagtcatagtattccccgtctttcagcatcaacgggccagaagctaacacagaacctttatttttcttgtagttcttctcgatctgcctgtcccaaggaatgagcttcacttttcctttcttctcataaactgctcctgtcacccgcaacttcaattcatccaacgaagtagtgtccacaacctgacttcccaccttcagaaaacagacagagtttcctttcgtcatatcaaaataggaaccgttgatggctccgatggcctgatgtttccgggcaatccggcttattttctccaattgtccggtaaaggcaattccgatctttttgccagccttcggatttatctccaatatattaatggactgagtgccttgataaagagaagggatggaagcccgcttatgtacaattccattttctacggtcaccacttcccaaggagctgtcactattgctatagaatcagcaacagtctgtgcatttacaaccttaacggccaacaagattagaacaatgataccaacaagatttcttctcataaacagtctataagttttgggtccatatttcatgtaataactaatcatacaaagatatacttctcctgtcatataactaatatattcggatataaataaattaattcatttacgtacggacatgaacataaactctataacattaccgatattactctatatgtttagatatcaacgacttatagtttcctatcattttgtagtgtactgaataagttgacacttcaaaaatcgaaaataaagatgaaatattcgaaaaagaagtacaactattacagtgatgatgaacgaatgtcttatattcgtgagtatttatcaagtcccgagagcaaatctgagttttgtaagcgtcacggcttttgtgccaagcttcttacttattggcttaacaagtatcaaatagaagacaaagatatgggtagatcctctaaaccagtaaatagcgatgctattgattctagtatttctgagctccagaaagaactatcgctattgcgtgctgagaaccgtaaacttcatcgggctcttgctgatgagagtttacgtcacgaggcgtgcgaagaactcatcaatcttgctgaatccacgtatcatatcaaggtacgaaaaaactccgatgccaagtaatcgacaccttgtcacagaggtactcatcccgacgcaaacgtggttgtataaagttcctctgtgattacttcggcataacccgacaaggttattacaagcatgtgaaccgacatttggaggttgatatccttaccacaagcatcgtgttgtactgtaaagaactgttggaactcatgcccaaagctggtatgcgcgagttatacgcctgctgcgtgagtaagtttggaccaaagatggttatcggtcgtgatcgttgttatgacatttttcgctccaatggtttgtgtcaacgtacaagtcgcaagcgtcctaaaacaacgaattcgaaccataattactatatctaccccgatctgttgaatgttgcacccaaatttgtcgctacaagattgggcgctatggtagtggcggatataacctacgtaaacaccggtcagggctgggcttacctctcgttgcttaccgatgcgtcaagtcgtgccatcgtgggatatgcgctttacaaaactcttgagacggaggggcccttgaaagctttggagatggcaatatcattctatgagaagtatcacatagacatgagcactcttattcatcattccgaccggggtgtccaatattgctcaaataaatatgtagagaggcttaaagagcatcaaatcaacatcagtatgacgcagtgtggtgatcctttacataatgcattggctgaaagaatgaacaacaccattaaaaacggttggctattcgactgtgatgatgagagcttcgagcaagtaagcaagcgcattgaagatgctgtatatgtatataatcatgtgcggcctcatcaagggataaacatgaggacacctatggaagtggtcagcgaaacgggaggattaacagcataatacccgctcgtcgggacgggtggtcccgccccttgccgctagggcgatccccgaccgaagagtttttggttgttggcaacattacattttcctgaagaaggcttgcgtaaataaaggaagatgcataaatttgcaagcaccaacaaaagacaactaacataggaataagaataacaaaagtaaacctatttagatattaaagtatattgagtaaactaattcagttataacaaacgaagttgtcaactaaaaccagtacacatcagtctgtttgttgttctatatagagctttttagtttctcccgtttgaaactttagtttctccagcttggaactaaagtttcatcggcttgaaactaaagtttcaaagccttgaaaccaaagtttcggacgcttgaaaacattggttccagcgtatggaaacttattatactagagtgttcattatgtgtcggacagaatatgaataattataaaatatggggtgagatgtttttctaaaaaggttactgtgaagtacccgaacggggataaaccctttatagcatgtgtatgttgcccacaacatgcttattgcttatataaacggagtctcttggatgcccgttttatataattgtttgtttttgtttaagtacattctgtcctggtgaggaaggatgtacttttttatgcccgaaggtccggaatcagatagtcacgaaggtccggtcggaagatcaacgccttccgtccgctccccacatcatcttgctgcggagggtatcgaagaaaatatgattgaaccgtttcactacttttatactgtagtctgcccggcgaatggtcagctgagtcgtctccttgcacgtttcgctgctgccgtcgatggcaacgaggaagttatggctgcggctttccacgtccagcgtgatttcccagtcgtcacgaatgacgataggacggacgttgaggctgtgcggagctaccggggtaatggcgatcgtattggaatgaggaacgatgatcgggccgcctacgcttaatgaatacgcagtagaaccggtaggagtggcaatcaccagtccgtctgcctgataagtattcagataagcaccgttgatcgcagtgcggatgctgatcatggaagaactgtcccgcttgagcaccgcaatttcgttgagggcatagggcgattcctgaagatttctgtcattgcagataagttgtaatacacttcgttcctccacactgtatctgcctgcctgaatctcttcgaaagtcacctccatctcttcgggtgaaacatcggcaagaaatcccagtcgccctgtgttgatgccgagaatggggatttgttttctacccacccggcgggcagctttcagaaatgtgccgtcacctccgatgctgataaccatatcggctgtgaagtcgttgccttcgagcagggcgtcgacaggcacttccatttttaaatctgccgtcaggaactggtaaaactcccggcacatacagatttccgctccctgcttcttgagaagctcgaacagtctgagtgcatgcaaagactttttaggctgatacgtatttccgaaaatggcaaatttcataagctgtttcattagtttcggttgcaaaattggcattttttcttggatttctactttaaataaccaaaaaagaactgagaatgcgtttcgtattattaggcaactaataataatatttgtatttttgcggcaaatattgcgtaaaactatgactaaattaagtgtaaacataaacaaggttgctacattgagaaatgcacgcggaggggatatccccaatgtggtgaaggtagcacttgattgtgaagctttcggggctgacggtattacggttcatccccgtcccgacgaacgccacatccgccgggcagatgtatatgatctgcgtccgttgttgcggaccgaattcaatatcgagggctacccgtcgccggagtttatagacctggtattgaaagtgaaacctcatcaggtgacgctggttcctgacgatccttcgcagattacttccaactccggttgggatacaaaagcaaatctggaatttctgtcggaagttctcgatcagttcaacagcgcgggcatccgtacttccgtctttgttgccgccgacccggagatggtggaatatgcggcaaaagcaggtgccgaccgtgtggaactttatacggaaccctatgctacggcatatccgaagaatccggaagcggctgttgccccatttgtggaagcagccaaaacagcccgcaagctgggcatcggcttgaacgccggacacgacttgagtcttgtgaatttaaactatttctataaaaacattccttgggtggacgaagtatccataggtcatgccttgatcagcgacgcattgtatctgggactggaacgtactattcaggaatataaaaactgtctacgctaatgaatgtattgatgttattggcccagggtgccatgaatatggccgactcgctggcaactgccaacccggtgctgactccggtcagcgctcccgagatgaatatgcttgatatggctatcaagggtggttggattatgattgtactgggtgtactgtctgtagtctgtttctacatcttatttgaacgtaactatatgatccgtaaagcgggaaaagaagacccgatgttcatggaacggatcaaggattatatccatagcggtgaaatcaaagcggctatccagtattgccgcacgatgaacactccttcggcacgcatgattgaaaaaggaatcagccgtctgggacgtcccatcaacgatgtgcaggtagccatcgagaatgtcggtaatctggaagttgccaaactggaaaaaggcctgaccgtcatggcaacaatctccggtggtgctccgatgctcggattcctcggtacggtgaccggtatggtacgcgcattctacgaaatggcgaatgcgggaagcggaaacatcgatataaccttgctttccggcggtatctacgaagccatgatcaccaccgtaggcggtctgatcgtgggtatcattgccatgtttgcttacaactacctggtgatgctggtagaccgtgtagtaaacaaaatggaagctcgtacgatggaatttatggacctcttgaacgagcctgcccaaaagtaaccctgagacgttaatcactatcattaaccactaatcaataataaagtgggattaaaaagaagaaatagagtatcgcccaatttcagtatggcatccatgacggacgtcatcttcctgctgctgatattctttatgattacctctacggtggtgtcgcccaatgccataaaggtgttgttgccgcaaggcaaacagcagacttcggccaaaccgctgacaagagtcgtgatcgataaagacctgaacttctacgctgctttcggcaatgagaaggaaaagccgctgtcgttggacgaactgactccgttcctgcaaggttgcgcggagaaagaaccggagatgtatgtggcattgtatgcagatgagtcggtgccttaccgtgaaatcgtgcgggtgctgaacattgcgaatgagaatcattttaaaatggtgctggctacacgcccgccggaaaacaaataaagtaagtagttgctacttaactactaaaaaaagaaacaattatggacgacagaagaaaaaagggtgaattcgtcggcgcgctgggtgcactgttggtacacgtggcagtgatagctcttttgattctggtgagctttacggttccccagccggatgaagacgcaggcggcgtacctgtgatgctgggaaatgtggagtctgcccgaggctttgacgacccttcgctggtggacgtggatatactgcccgaagaaccggaagcacctgcacctgcggaaacgcagccggaactgccctcggaacaggatctgctgacacagaccgaagaagaaacggtagtgctgaaaccgaaaacggaacctaaaaaggagaccgtgaaacccaaagaggtagtgaagcccaaagaaccggtgaagaaacccgaaaagacagaggcggagaaagctgccgaagcgaaacgtcttgccgaagaaaaagcggaacgtgaacggaaagccgccgaagaagctgcgaagaaaaaggttgccaacgctttcggaaagggagcgcagatgggaggcagcaaaggtacttccgccagcggcacgggaacagaaggcagcaaggacggcaattcatccaccggagcgaagaccggaaccggaggttacggaacatttgaccttggcggacgttctttaggtacgggcagtctgccaaagcctgcctataatgtgcccgaagaaggacgtgtggtagtcaatatcaccgtgaatccggcgggagtagtcattggaaccagtatcaatcctcaaacgaacaccgtgaactccaccctgcggaaggcagcggaagacgcggcgaagaaggctcgcttcaacaccgtggaaggaccgaacaaccagactggaaccatcacttattattttaacctgagatagtatcactaatcaaaaatataggattatgggaactgtatatgctttttttgcagatggctttgaagaaatagaagcctttactgctgtcgacactttgagacgtgccggactgaatgtgcaaattgtatctgtcactccggatgaaattgtaatgggcgctcacgatgtgtcattgctctgtgatataaactttgaaaactgcgatttttttgatgccgatctgctgttgttgcccggaggaatgccgggagcggctacgctcgataaacatgaagggctgcgaaaactgcttcttgactttgcagccaaaggaaaaccgatcgcagcgatctgtgcggctccgatggtattgggcaaattaggtttgctgaaaggtcggaaagcaacttgctaccccagctttgaacaatatctggaaggtgcggaatgtgtcagtgaacccgtagttcgggacggaaatatcatcacaggtatggggccgggcgctgctatggagtttgctctgaccatcgtagatctgttggtcggcaaagaaaaagtagacgaactggtagaagcgatgtgtgtaaaacgctaagctgtctatgaaacaatctgtgattattgtcgccggtggaaagggcttgcgaatgggaagcgatcttcccaaacaatttcttcctgtcggtggcaaacctgtgctgatgcgtacgctggaagcattccgcaagtacgatgcgatgcttcagattattctggtacttccccgtgaacagcaggacttttggaaacagctttgcgaagaacatcatttttcggtggaacatcttgtggcagatggcggcgagacccgttttcattcggtgaagaacgggctggcgcttgtggaggctcccggtctggtaggagtgcacgacggagttcgtccgtttgtaacccttgaagtgattcgccggtgttacaagctggcggaacaacataaagctgtgattccggtggtggatgtagtcgaaacgctgcgccatctgacggatgccggaagcgaaacggtgagccgtactgaatataagttagtgcagactcctcaggtctttgaggtggagctgctgaaacaggcttatggacaggagtttactccgttctttacggacgatgcttcggtggtcgaagcaatgggcgtacccgtatatctggcagaaggtaatcgtgaaaacataaaaataacaactccctttgacctgaagatcgggagtgctctcttgtaaatgttcgatttaaccacacgcgacatcaaatttatctccggtgtagggcctcagaaggccgcagtattgaacaaggagttggaaatctactcgttgtacgatctgatttattattttccttataaatatgttgaccggagccgcatctattacattcacgaaatagatggcaatatgccgtatatccagctgaaaggagagattctcggcttcgagacgataggcgaagggcggcaacggcggctgacggcccatttctccgatggaacgggaatcgtcgacctggtgtggtttcaaggcatcaaatatatattaggtaagtataaacttcacgaagaatacatcatcttcggtaagcctaccgtgtttaacgggcgtatcaatgtggcacatcccgacatcgataagccggatgatctgaaactttcttccgtcggactgcaaccttattataatacgacggagaaaatgaaacggagttttctcaattcgcatgcgattgagaagatgatggctacggtgatccagcagatacaggaacccctgccggaaacgctttctcccaaaatcctgtcggaccatcatctgatgcctctgacggaggcactccggaatatccatttcccgacgaatcccgattcgctgcgcagggctcagtatcgtcttaaattcgaagaactgttctacgtgcagctgaatatcctccgctatgcgaaagaccgccaaagacgatatcgtggatatatctttgaacgggtaggggatgttttcaatactttctattcgcagaaccttccttttcagttgacgggtgcacagaaacgggtactgaaagaaataaggaatgatgtgggaagcggccggcagatgaaccgtctgcttcaaggagacgtgggtagtggtaaaaccttggtagcattgatgagcatgctgcttgcactggacaacggttttcaagcgtgcatgatggctcccaccgaaattttggcgaaccagcattacgagacaatcaaggaactgcttttcggtatggatatccgtgtcgaactgctgaccggatctatcaaaggaaagaagagggaagcgatcctgaccggactgctgacgggagatgtgaaaatcctgataggtacgcacgcggtcattgaagatacggtgaacttctcttctttgggactggtcgttattgacgaacaacaccgcttcggagtggcacagcgtgcccgcctctggacgaaaaatatacagccgcctcacgtgctggtgatgaccgccacacctattccgcgtacactggcgatgacgttgtatggcgatctggatgtttctgtcattgacgagctgccgccgggacggaaaccgataaccaccattcatcagtttgacaaccgtcgggaaagtatgtaccgcgccgtacgcaagcagatagaagaaggacggcaggtgtacatcgtctatcctttaataaaggaaagcgagaagatcgacctcaagaatctggaagaaggttaccagcatatcctggaagagtttcccggctgtaccgttgccaaagttcacggcaagatgaagtctgcggagaaagatgagcagatgcagctctttatttccggacaagctcagattatggttgccactaccgtgatcgaagtcggggtgaatgtccccaatgcttctgtgatgatcattgagaatgccgaacgcttcggactttcgcagcttcatcagttgcgcggtcgggtgggacgtggcgccgaacagtcttattgtatccttgtgacgaactacaaactgaccgaagacacgcggaaacggctggaaataatggtgcgcaccaatgacggctttgaaatagcggaagcggacttgaaactgcgcggtcccggtgatttggaggggacgcagcaaagcggcattgccttcgatctgaagattgcgaaccttgcccgtgacggtcagttgttacagtacgtccgttcgatagccgaagatatcgtagataacgacccgtcggctcaaagtccggagaatgagattctgtggcggcaactgaaatctctccggaaaacgaatgttaactgggcggctataagttgaaaaacggttaaacatgcagtttatttgcgggaatgtgttgcaaaacatgtttcgtttctattcctcctatttatagggctttaacgctgctttttctgttcttttcatctccgtacttctgaaaaatagttaatgacttacttgccctttcatcggaaaatactatctttgggggaattttttatagtaaatgtatagtttaatcttttgaaagtcacacatcatgatcgaaaaaacgctggttattttgaagccgtgtacccttcaacggggattggttggtgagatcactcatctctttgaacgtaaaggactacggttggccggcatgaaaatgatgcaactgacggatgaattattaagcgagcattatgcccacctgagcagcaagcctttctttcagcgcgtgaaagattcgatgatggcaactcctgtcattgtttgttgttacgaaggtgtggatgctattcaagcagtccgtacgttggcgggaccaactaatggacgtctggctgcgccgggaaccattcgtggggattatagtatgagttttcaagaaaacatcgttcatacttccgattctccggaaactgcggctatcgaattaacgagattttttaaacctgaagagatattcgactacaaacaggcgacttttgactacctgtatgcgaacgacgaatattaattgaattgacaagaacgaatgaatttcaattgcattattaaaacaggattggtagctgtagcagctatggtcagcctgagctctttctctcaagacctgattgcccgccaagctccgatagacaagaaattaaaaaccgtagactctttggcacttcagaaacagatccgtgccgaacagtcggaatatcccgccttaagtctttatccaaactggaataaccagtatgcacatgcttacggcaatgctatcatccccgacacttataccatcgacctcacaggcttctgtatgccgactccgagtacgaagattacttcgcctttcggtccccgctggagaagaatgcacaatggtctggacctgaaggtgaacatcggtgacacgattgtagctgcctttgacggtaaagtacgtatcgtgaagtatgaacgcagaggatatggtaaatatgtagtgattcgtcatgacaatggattggaaaccatatacggacacttgtccaaacaactcgttgaagaaaatcaattggtaaaagccggtgaagtgatcggtctgggtggtaacaccggacgttctaccggttctcatctccactttgaaacccgctttctgggaattgccatcaacccgatttatatgttcgacttcccgaaacaggatatcgtagccgatacttatactttccgcaagacgaaaggtgtgcgtagtgccggttctcacgacactcaggtagccgacggaacgatccgttatcataaagtgaagagcggagatacattgtcacgtatcgctaaagtgcgtggagtatcggtcagcacgctttgtaagctgaaccgtatcaagccgacgaccaccttgcgtatcggacaagttttacgttgttcgtaaagatgtaatacaataatagctttggaagagggcactttaatataatttagagtgccctctttctgtttttacttaattattgttacctttgcgcactatttggaagaagatgaaagataccaagcaacaatttgaacatgtcatcgccttgtgccgtgacttattctccaagaagctgcacgattacgggcctgcatggcgtatcctgcgtccggcttcggttactgaccagatttttatcaaagctaacaggattcgtagtatcgaaaccaaaggggtgactctggttgacgaaggaatccgttcggaatttattgcgatagtcaattatggcattatcggtctgatccagctggaactgggctatgccgaatctgccgacatcagcaatgaggaggctttggctttatatgacaagcatgcaaaggaagcgctggagctgatgcttgccaaaaatcatgactatgatgaggcttggcgcagtatgcgtgtgagttcctacacagacttgattctgatgaagatataccgtaccaagcagattgaaagtctggcagggaacacgttggtgtcggaaggtatcgatgctaactatatggatatgattaattattcagtattcggattgatcaagatagaatttgaaggataagaacttacatatcatccagaagacaggagcgaatgtctgccgtttccttttagcggcatcgttcatcttttccggttttgtgaaggctgtcgacccgctgggcttccagtataagatacaggactatctgaccgccttcggggtgatttcatggtttccttctttcttcccgttgttgggaggcattatattatccgccatcgaattttcaatcggtatcttcctgttcttcggtatcaagaaaacaatctctaccacattggcgttggtgctgatgattttcatgacaccgctgacgctgtatctggcgattttcgatccggtgtcggactgcggctgtttcggcgatgcctgggtgttgactaactgggagacatttgcaaagaacatcgtactgctgcttgccgcgattgctacattccagtggaggaaaatgctgatcagattcgttacccgaaagatggaatggctgatttctctgtacacgatattctttgtatttacactgtcgttttactgtctggaccgtctgcctgtgctggacttccgtccttacaagatcggacagaatatcatgaaaggcatgagtattcccgaaggggcgaaaccgagtgtatatgagagtgtctttatcctggaaaagaacggggaaaagaaagagtttacactagacaattatccggacagcacatggacctttgtcgatacgcataccattctgaaagaaaaaggatacgagccttcgatccacgacttctccatgatggatatgagcacgggtgatgatatcacggaagacgtgctgacggatatgggatataccttcctgctggtggcacatcgtatcgaagaggcggacgacagtaacattgatttgattaatgagatatatgactactcggtagagcatggttacagattctactgcctcacttcctcaccggaagagcagatagaattgtggaaggacaagaccggtgcggaatatcctttctgccagatggatgacattacgctgaagacgatgattcgctctaatccgggactgatgctgataaaaaacggtacgattctgaacaaatggagtgatgaagacattccggatgaatatgtactgactgacaaactggagaatctggaactcggtcagcagaaggtccggagtgacgtacatacgattggatatgttttcttgtggtttgtcattccgctgttgctggtgttgggagtggacattctgattgtccgccgacgcgaacggaagaacgaaaagcggaagcagcaacaggaagtaaaagaataataaatttattaaccctttaaataaagaacaaaatgagaaagaacattgttgcaggaaactggaaaatgaacaaaacccttcaagagggtatcgctttggcaaaagaactgaacgaagcattggctaacgaaaagcctaactgtgatgtaatcatctgtactccgtttattcacctggcatctgtaactccgttggtagacgctgctaagatcggtgtaggtgctgaaaactgtgcagacaaggcatccggtgcatatacaggtgaagtttctgctgaaatggtagcttctacaggtgcaaaatatgtaatcctgggtcactcagaacgtcgtgcttactacggtgaaactgttgctatcctcgaagaaaaagtaaaattggctctggctaacggtctgactccgatcttctgtatcggtgaagtgctggaagaacgcgaagctaacaagcagaacgaagtagtagctgctcagatggaatctgtattctctctgtctgctgaagacttctctaagatcatccttgcttacgaaccggtttgggctatcggtacaggtaaaacagcttctcccgagcaagctcaggaaatccacgctttcatccgttcaatcgtagctgacaagtatggcaaggaaatcgctgacaacacttctatcctttacggtggtagctgcaagccttctaacgctaaagaactgttctctaaccccgacgtagacggtggactgattggtggtgctgctctgaaagtttctgacttcaagggtattatcgatgcgttcaatgcataattagaatatctttcgggaactgactaaaaagtagatagtaactctaaactctcctccttcaggaaggaggggaattgcagatagtatcgactttttagccacttcctgaaattaaacttttatcgaatgagaaaactaggtttacttttatggatgctggcttttaccgctgttggtgcacaggcgcagaacatcatcaagagtctggaacgtacagtgccgggacagggaaaggtgacgattcatcaagaccctaagatagaggcattgataggcgtggaacgtccttctatgggcgaacagaaagtgttgaaagcagccggattcagaatacaggcgtatgccggtaataatacccgtgaggcaaagaatgatgcttatcgtgtagcttcccgcatcaaagagtatttccccgaactgacgatttacacttcgttcaatcctccccgctggctttgtcgtgtgggtgatttccggagcattgaagaggcggacgcgatgatgcgtaaactcaaggcaaccggtgtattcaaagaggtctctatcgtcaaagaccagatcaatattcctttataattgtatcatgttagaaaaagaagaaattgtctctccgaatctggaggagttgaaaagtcattatcacagtattattactttgttgggtgaagatgccggaagggaaggtttgctgaagacccccgaacgtgttgcgaaggctatgctgagtctgacaaaaggttatcacatggaccctcatgaagtgttgcgttcggctaagtttcaggaagaatacagtcagatggtgatagtgaaagacattgatttcttctctctctgcgaacaccatatgttgccgttctacggaaaagcacatgtggcatatatccctaacggctatatcacgggattgagcaagattgcccgggtagtcgatatcttttcccatcgcctgcaagtgcaggaacgcatgacgctgcaaatcaaagattgtatccaggagacactgaacccattgggagtgatggtggtagtggaggcaaagcatatgtgtatgcagatgcgcggtgtagaaaaacaaaattctattactactacttcagactttacaggagctttcaatcaagccaagactcgcgaagagtttatgaatctgattcagcacggcagggtgtaatacgctttacaaaatgtggacgatgtagttccccgtcaatgaggattgcctccggtaccgatgaaggggtgtctcggcaccgatgagaaatttagcgtaatacaacgcggtcgcccaggcgcttcgccatcagactttgcacttcccgcatctcattgtaacgctgcatcagcgaattacatttctcattgtcatgagcgagtgccggatcttgcagggcataaagcatatgtttcagttcttccgtgacaatcgcatacttgaagttgatcatcaacatcgggacgagttcgtacagccgttcttcatctgtcacgatcttctgtgatttcgagtgatacttacttagctgataacgtacattgatcaagtccacgctcaaccggctgatggtctggtcgggatgtgccaggaaatagcgttccgcgataaaaccggcatcgtgtatatgcgtggcggcttctgtcagaatctgtcggtgcaacggattatggaaagccaggtcgtcttccttcagatcattcaccacatattcgataacggttaccggaatttcatttccttcttcgtcggtaaggttgcacatcactttttcaccataacggactactgcctgcaggatcaatcgctcaaacttatagaactcctgaccttctttcccttcctgtggaataaaggaggtataagaatctccgggaacagtggtatccgtagtggaggcaggtgcattgccgggaggaaatcctgccgcacctcctgtagcagcggacatcggatctgcgaaagatacgatattgccatcgtcatcatattcgggttccggtggcattcctgcattgccgtaggggctcgatggactagaataagtcggagcaccggaataagccggtgtgccggaagcggcagctgtaccggaagtatctccggttgttgaagatgaatgattatagctgggacgattggctttttcagcctgcgcctctcttaatttggcgacttccgctaccagcagtttttcttcgatgcgcagatgttggctgcattctttgatgtagacatcccgtataatggcttccggtatgacggaaatgcttcgtacgatattcgaaatcagttccgcgcgtttgatcggatctcttcccgcgtcttccatcagaaggtcggtcttgaagcggatgaaatctttctcgtgctcatggatgaatgcctggaattcttccgaattatgtttgcgggcgaaggagtccgggtcgtctccgtccggaagcaggcatactttgatgttcatgccttcttccagcagcatatcgattccgcggatagaggctttgataccggctacgtcaccgtcatagagtacggtaatgttattggtgaaacggtggatcagacgaatctgtccaggcgtcaatgcggtgcccgatgaagcgactacgttttctatgcccgactgatgcatggagataacgtccgtgtatccttccacaaggaaacatctgtcctgcctgacaatcgcctgtttggcaaaatagattccgtatagctcgttactcttgtggtaaatttccgactcgggagagttgacatatttcacctttacccctttggtggcggtgctgagcacacgtccgccgaaggcgaccacctttccggaaagggtatggacggggaaaatcacacgtccccagaagcggtcacgaagacggtggtcatccgtttcgtagcagattcccgttttcaccaggaattctttcttgtagcctttgcgcaatgcttcttgtgacatggcatcatggctttccgtacagtaacccaactggaatttctcaatgatgtcatcacgaaatccacgctgacggaaataagctagaccgatgctgcgcccgtccacatgattctttaagatattctgaaagtaatcgcgggcgaagttgttgacaatgaacatactttcgcgcgttgtctgcgcctgtttctcttcattggtcagctcccgttctttgatttcgatgttgtatttcttggcgagatatttcagtgcctcgtaatacgacatctgttcgtgctccatgatgaagtggaccgagtttccgcccttaccgcagctgaaacacttgcaaagtcctttggcaggggagacgctgaatgacggagtcttttcgttgtggaacgggcacagacctacatagttcactccgcgtttgcgcagggtgacaaactcagacactacatctacaatctgtgcggcatctaaaattcggtctatggtaacttgatctatcattcttcttttctcctgtgattccgtttttgcggatacaaaggtacatataaaaaaatcccctgcaaagaacttttttgcaggggatggttaaatcttatcgaaggagaggatgatttacttgatcttttcccgaatcttggtgaggtaggctttcataccttccgcatctttcttttcgatgatttcgagaagatttttcagctctgtacggatattggccacttgtcccggggtgcgtgggttgaacaggatttcctgcagcaggtagtcatcttcgctcagcagcccctttgcgatagccatgtgcttcttgaaagtcgttcccggagcttcctgatgcttcatcacggcagcaaatacgaaagtcgaaacgaatgggatggagagcgagtatgccaccgtttcatcatgttcgtcgaacgtatattcgaagatgttcaggcgcagcgtctggtaaaggtctttgaagaaaatctttcccaaatgatctccttcgctgatgataatcgcattctcgctgctcagattgctgagactggcaaatgttggtccgaacatagggtgactggaaacgtagcggaatccgctttcttcgtagaacttcttcagtcctgtctttacggaagcgatgtcactgatgatacagtctttgggcagcacaggcaataccttgcggaaagcatccagcgtgtattttacggtgacggcattgatgaccagttcgggttcgaattctttgatttcctccagtgtggtgaaacgatacgtgttatacacgaaacgcaactggtgcgggttgacgtcaaacacggccgtctcgtgctgaaaactcagtatatccgtaaagaaggaacccattttaccggctccgaggattaatattctcatatctattattattggggagtttctcaaaagtcaatagtctcttcaaaagtcaatagtatctctaaaagttaatagtatctcacattggggtgactaacaagtcgattctatctttattctcctccttccagaaggaggagaggtaagatactaccgactttctagtcggcctcagttgtgttactgccgacttatttgttagtttccatttgatttttgagttcttttgggctttttatttattaataatctctatctgctggcggacagactcttcgtggattgcttcgaagatcagcttcataaagtctgcgctcataccgcattgttctccttgcgcaccgcgcttttccaggatttcattgtagcgtcctgcttgaagaacggtgattccgtgttcttttttgtaagtaccgatctcacgtgctacgcgcattctcttagccagttcctggatgatgttatcgtcgcattcgtcgatttgcttacgcagttggcttaggctttctgtcgtctgggtttcggtacggatcaccaataagttgaggatgtagtcgagtacatcgggcgttacctgttgagaagcgtcgctccacgcacagtccggattgcagtgactttccacgatcagaccatcgaagttcaggtccattgcctgctggcagagcggggcaaccagttcgcgttttcctccgatgtgacttgggtcacagaaaatcggcaggttaggcagacggcgacgcagttcgataggaatgtgccattgcggaaggttgcggtatatctttttgtcatagctgctgaaaccacggtggatagctcccaaacgcttcaagcctgcgttgtggatacgttccagtgcaccgatccacaattccaggtctgggtttaccggattttttaccagcacggggatgtcgacccctttcaatgcgtcggcaatttcctgtacggcgaaaggattggctgtggtacgtgcgcctacccaaaggatgtcgattcctgctttcagacattcgtaaacgtgtttggcagtcgctacttcggtagaaacatacatacctgtttctttcttcacttccttcagccaggcaagtccttccacaccgattccttcgaaacctcccggtttggtacgcggtttccagataccggcacggtatatcttttgtcctttggctgccagttgtttggcggtttccattacttgttcttcagtctctgcgctacacgggccggcgataacaatcggtcttttggcttcgatgcccggtaataaaattgattcgagttccatattcttattgtttttattttattcttgttcttactctttcgggcaggcgtttcctggtctgccgctgattaacttttatcggtcttttctttttaagaaagcttcttgattctttccaatgcttccgccagtttggcatccttgcaacaaagggaaatacggataaaccttgctccgttgctgccaaagatgaatcccggcgtgataaatacccttgcctggtgcaatactttttcggtcagttcttctacatccttgcacgaagcgggaatctttccccaaaggaacatacccacctggttttcgtcgtaggtacaccccagtgttttcatgatttcgccggccagatggcgacggccgcgatagttgtggttgttaccttcgtaccagtccgcttcggcttccagagctgtggcggctgccagttgcatggcacggaacataccgctgtcgatattgctttttactttcagtatccattgtacgaattcggcattcgaagccagcattccgatacgccatcccggcatattgtggctcttgctcatggagttgaattcgatgcagcactctttggctcccggtacgctgagaatactgatcggcttttcgttcaggataaagctgtacgggttgtcattcacgatgacgatattcttgcggcgtgcgaagtctaccagacgttcgtagagttccggagtggcgttggctcctgtcggcatattcggatagttggtccacattagtttcacgcggctcaggtccatcttttccaatgtttcgaaatcgggcatccagccgtcttcttctttcaggtcgtagctgattacttccgcaccgagtattttactcagagaagtataggtggggtatcccggattcggcaccagtacctgttcgcccggattgacaaaagccagtgtgacgtgaagaataccttctttggaaccgatcagcggctgtatttccgtattcggattcagttccactccataccagcgttgataccaggctgcgaaacctttacggagttccggtatgcccacatacggttggtaaccgtgtccgttgggatcgtgagcattgttgcacaatgtttcgatggtaacctttgaaggaggcatatcgggacttccgatacccagactgataacgtcttttccttctgcattcatttgtgctacctctttcagcttctttgagaagtagtattcgctgacacttgccagtctttcggcaggagcgattttatacgtttgactttccttctgcatattcgcctaatattttaagttctttggttaatggagtaattgctgctatagattgtttatatctcagataatcattgaaagatacatcgacgtaaaactgatattcccattcccgtccgatgatcggcagcgattgtatctttgtcagattgatgttgtagaacgaaagaatggataatacttgcgacaggcttccttctgtgtgtggcaatgtgaataccatgcttgccttgttggtcgcctttgcgtgatgctggcggagttcgtccacttgccacggatcggcaactaccagaaaacgggtgaagttgtgcttgttggtttcgatgccttcttggagcactttcattccgtagcgttctgccgccgttttcgagcaaatggctgcatgccctttcaggttttctttcttgatgatttccgcgctgcgtgccgtatcttctccttccactactttgagttgcggatgctgattcagaaaatcacggcattgcatcagggcgatagggtgggagttgacttctgtcaggtcttcccagctttcttcgggcaggcagacgaagctatgtgagatgcgcagcttgtattcgccgataatctgcgtaccgctttgtctcaacagttcattgttgtgcagcaggcttcccgctatcgtattttcgatggctagcattccgatgacctggctgtctttccgtatcgaagtaaacacgtcttcgaagttggcacaacagattaactctatttcttctccctcgaagtacttgtgtgcggcgatatcgtgatatgagccgagtgttccttgaattgctatctttttcattgttctaatagggttatataaaaaaatcccgcgtccatatggaagcgggatttatatgattaatttcttcatctcagtccttaagcatcatgtcacttgatacatacaaactcccgctctactttctggctaaagtaaaagtaaaaaaagaagtaatatgcataagaaaatgatttcatacgaatctttgtttctgctttggtttctaattctggggcaaaagtaataattttctgttagatgcaaacaaaaagcgatactttttttgttttcttctctaaaaaagatgaaaaggtcacctgatatgacagtaatgtttcagttaaaaatgagtatataccgccgtctgcctagaagattcccgggagtgcttccggtttcggtcccaggttcttgaattctccgttcagactagcttcgtcttttggattcagctccagtgacttcttcatgtcttctacggaaccgtctttatcaccgttcagtagtttggcgcgtccgcgttctttataggcttcggcgaagttcgggttcaactcgatggcttcgtcaaacagggcgattgcttccgccagtttcttctgattgatataaagctgtcccagatagagataggcttgttcgttgaatgggtttatttccgttacgaacttgtagtccgtttccgcttcttcttcctgtccgttggcttctttcaccttgccacgcagcaggatggcggtctcttcttccggattctgggcgagtacggcgtctatgtcttccattgtttccttgtattgcttcattttcagcagagcttccgcacgcatcagacgggcttcgatgaagtcgtctttcagagtgatggctttcgtcagatgagcgatggtcatgatttcgtcatcctgtcctttgcgggcttttccgagcaggaagtgtgcgactgcatttccttcttcgatggcgattgctttgccggcagcctcttccattgctttgtaatcttcctggatgtagcagacattggccagtgtgaggaatgtgctggtcacatgaggttccattactgccattttctccagaagttcgcgggctttttcggtttctcccatcgggatgtaaagttggctgagatagcccatcgtttcgaaatcctcttcgatggcaagcgcctcggtaaagcactttatggcataatccggacgtcccatgcgttgtgcacgcaagccgtcatatttgaatatctcgaagtttttctgatcgtttttctgtttttcactctccggagtttcggacttaccggagaaaaaagacttaaaaaagttcggcatgatagtgttgttttagagtttatctgcaaatgtaataacttattttgaaatatgtagcattccgtcctgcatcttcagctcgccttcgtccaataaatatcggattacttgtccgatatcctctttttccgcctttatctgatcggctgtttcggcaggagtgagagggctgtggctgagtaagttgagtatttgccttttcacttcttcgtaagatttctcggataagttgtcggtggcacgcttgctgaggcagacatcgcattgcccgcagttgtgttcgtttttctctccgaagtagcggagaagcatccggctccggcatatgttttcggtggtgacgtattcttccattgccttgatgcgtgcttcatagcgggctttgcgctcttcgtagacgctggcgggaatatgcaggaagcgtaattccagtcgttcgcgcgtatatataatataaggtgtctttttgcggggaatgtagtccacgatacggcgtttggttaacgtcaccaatatattatagatttgctggcgtgtcagtccggtgcggacggcaagagactcttcgctgatgtaggcataatcggtgaaaactcctgtgtatgagcgaagaatactctgtatcagagcttccgcctcctttcccatctcccgcaacttgtatagttcgtcccgacggatggtaaagagaatccgtgatgaattatcctgttcgtccgtgtattccagatagcctgcctgagtcagtattttcaaggcactgtctaccggcaccggaaagtatttgaactttcggcagaactcttccagattgaattcacggatacattgaaaaccgtcgcccatcgccatttggtaatagtactggagatgttcgtagacattcagaatgtactctttgtcggggaaggtgtcgaccactcgtttatggagtgttgtcttgtccgatttggagtacaggatgacggcataggctttctctccgtctcttccggcacgtccggcttcctgaaagtaggcttcgggagagtcaggcaggtcgagatgcagcacgatgcggacatccggcttgtcgatacccatgccgaaggcattggttgccaccatgacgcggacttctccgctttgccagcgtttctgccggaggtctttgacggcgttatccagtccggcatgatagaagtcggcggttatgccttcgttcatcagcagttcggtgatttctttggtacggcgtctgttgcggacatagatgatggcactgcccgatattcgttgcaggatatacaggagttctttcgttttgttgtcggttttgcgcacgatatatgccagattcttccgttcaaagctcattcggaagacatttccttcccggaatttcagacgggcctgaatatctgttacgacttccggagtggccgtagctgtcagtgccagtaccggaacttccggcaatagttcccgtatctctgcaattttcagatatgccgggcggaagtcgtatccccattgtgagatacagtggctttcgtctaccgtaatcatggagactttcatcgaacgcaacttggtgcggaatatttccgtatccagccgttccggagaaatataaaggaatttgtaattgccgaagatgcagttttcgagtgcggtaagtatttcctgccgcgtcatgcccgaatagatggcaagagctttgatttcccgcttccgcagattctgcacctgatctttcatcagggcgataagcggggtgatgacgatacaaatgccctcttgggcgagagcgggcacttgaaatgtaatagacttaccgcctccggtaggcatcagtcccagtgtgtctttgccttcgccgatactggtgatgatctcctcctgcaagtcgcggaaggagtcataaccccagtattgttttaatatctcctgatacttattcaatcggctttatatcctcgatttgaagttggacttcgccacgcttgtgcgtgttctcctcgatcgtatagcagatgtcgaatgaacgcttcgtcttgatatagcgcacatgagaactctgtccgaatgcgatgccgttcatgacgttattcgacttgttgtcaaccagttccagcttgatatgttcctgatcgcgtcccactactttgctggttccgtagtcatagacgtgatgcgtacagaagatcggtttgatattgtccggaccgaaaggattgaatttcttcaggtcattgaagaatttcgatgtgatgtctctgaagtcgatctccgcatctatattgatgacggcgctggtttgttccggcagaatatgttgtgacacatattcttcaaatcgtcgggtaaaggcttccacattctccactttcatggataaccccgctgcataggtatgtccgccgaagttctccaacaggtcgcggcaatgttcaatcgctttgtacacatcaaatccggagacggaacgtgcggaaccggtggccatatcatccgtccgtgtgagtactactgccgggcggtagtaaacttctgtcagacgggatgctacgatgccgatgacacctttgtgccattcctcattataaagcacgatggaacggcgttcggacagcccttccagattggccacaatattgttagcttcttctgtcatgctcttgtcgaggtctttccgggtttcgttgtactgattgatctgtcccgctttctccagtgcggcagaaaagtccttctctgtgaggaggtccaccgcttccttaccgttctggatgcgtcccgatgcgttgatacgtggtccgattttgaacacgatatcgctgacggtgatctccttttcggagagtccgcatacatcgatgatggctttcatgccgacgctggggttgctgttcagttgcttcaggccgtgataggcgagaatacggttttcgcccatgatcgggacgatgtccgatgcaatgctcaccgctacgaggtcgagcaatggaatcagatgatgaaattcaataccattgttgatagcaaatgcctgcataaacttaaaaccaactccgcaaccggaaaggtgggtgtatggataagtgttgtccaggcgtttggcattcaggattgcgacggcaggggggaggatatcgtccggcacatgatggtcgcagatgataaagtcgattcccttttctttcgcatacgttatttcctccactgctttgattccgcagtcgagtacgatgatcaatcctacgccggtctctgaggcatagtcaactccttttttagaaatgccatacccttcgttgtagcggtcgggtatgtaatagtcaatgttcgaatagaactgttgaataaacttgtagaccaatgctacggcagtagtaccgtctacatcataatctccataaatcagaatacgctctttctttcccatcgccttgttcagacgttctactgcaatgtccatgtccttcatcaggaacggatcgtgcaggtcgggcaattgcgggcggaaaaacttcttggcatctcctgccttcgttattccccgctgcaccaaaagttgtccaagtatcgggctaatgcctaattcctgggccaatgtctggcttgtctctgcctgttcgggtgtaatgggttgataattccatttgtgattcattttatatattgttttttctttttctgttctcaggggtcagaaaggcgctactttccaacaaggggtaaaagtacgaaaaaaagcggaagggtatagtagatatgacgaaaatatttcaaaacctgtggaattagctccttacgggcttggtattcaaatggagtaaactcgaatcagtaatacgctaaattgtcagttcatataaatcaagcatccgtatcatgtggggcaagcgttggtttccttggaggaaacgccagttccctttaaaaggaacggtcgtttccattaaaaggaacgctcgttccctcactgggaaacgacagtttccattacaagaaatgatgtgtactggttttagttgacaacttcgtttgttataactgaattagtttactcaatatactttaatatctaaataggtttacttttgttattcttattcctatgttagttgtcttttgttggtgcttgcaaatttatgcatcttcctttatttacgcaagccttcttcaggaaaatgtaatgttgccaacaaccaaaaactcttcggtcggggatcgccctagcggcaaggggcgggaccacccgtcccgacgagcgggtattatgctgttaatcctcccgtttcgctgaccacttccataggtgtcctcatgtttatcccttgatgaggccgcacatgattatatacatatacagcatcttcaatgcgcttgcttacttgctcgaagctctcatcatcacagtcgaatagccaaccgtttttaatggtgttgttcattctttcagccaatgcattatgtaaaggatcaccacactgcgtcatactgatgttgatttgatgctctttaagcctctctacatatttatttgagcaatattggacaccccggtcggaatgatgaataagagtgctcatgtctatgtgatacttctcatagaatgatattgccatctccaaagctttcaagggcccctccgtctcaagagttttgtaaagcgcatatcccacgatggcacgacttgacgcatcggtaagcaacgagaggtaagcccagccctgaccggtgtttacgtaggttatatccgccactaccatagcgcccaatcttgtagcgacaaatttgggtgcaacattcaacagatcggggtagatatagtaattatggttcgaattcgttgttttaggacgcttgcgacttgtacgttgacacaaaccattggagcgaaaaatgtcataacaacgatcacgaccgataaccatctttggtccaaacttactcacgcagcaggcgtataactcgcgcataccagctttgggcatgagttccaacagttctttacagtacaacacgatgcttgtggtaaggatatcaacctccaaatgtcggttcacatgcttgtaataaccttgtcgggttatgccgaagtaatcacagaggaactttatacaaccacgtttgcgtcgggatgagtacctctgtgacaaggtgtcgattacttggcatcggagttttttcgtaccttgatatgatacgtggattcagcaagattgatgagttcttcgcacgcctcgtgacgtaaactctcatcagcaagagcccgatgaagtttacggttctcagcacgcaatagcgatagttctttctggagctcagaaatactagaatcaatagcatcgctatttactggtttagaggatctacccatatctttgtcttctatttgatacttgttaagccaataagtaagaagcttggcacaaaagccgtgacgcttacaaaactcagatttgctctcgggacttgataaatactcacgaatataagacattcgttcatcatcactgtaatagttgtacttctttttcgaatatttcatctttattttcgatttttgaagtgtcaacttattcagtacactacagaccataaggaaccattgaaaacaaggcagtgtgacagcaaaatttgccgtcacactgccgtcacctactgccgtcacctcattaatcactcatattcaagatattacccccaacaaagtgacaaatgacagcaatttatagttttttattttaatagagagactagctgacacgtaagtatatcataagaatgttaatccaattgttgcggatggcagagttttttctttttcaaacattgtataaaggctaaattcgattcgctcatcactgcaaagaaatgattaaatggctacttatttcccggaaacaacccgtatgctttccgtttctgttccatcagctgcctggttctttctctatgcagtgattttctattagtctttcttcccagataaaaagggaatccgaatccgacacttacattcagatcacgggcgaatgtagaacttttatagactcctctctccaccttttctcccgtataaaggtctgttacatatttacgataagtaaatctccccaatggctgtatataattgacattcaacagtaaaaaacaatttcgactgagcttatagttgacagtaatacctgccgaaagaataaaagcatcaatactctcactgccataattactttcatcatcccctctatactctattctatataattcatttcctccttttttctttagttccgcacaaacacgctgataggaaatgctattcacaccaatccccaaacgaggataaaaagcccaatgggaattttcaaagcgataagcaacaccaaaatccagacagggattaacgtccggtttttgcgttcccggtatgagattattcacatagtaatccgcttcgactgcatgggctaattcagtataacaatcccgcctatatttcacgggaatccccaaacggatattcgtataccatccccatttacgcgaaaagaaatgttgcaaacgaaggctgatagcaggaaatacagatttctgatccgacattgcagtgaacatatttcccttcccccgataagccaggtcaaagttggttcccacatccaagtctaactgcagcaacttattcttggtagatggatctttaagaaacagactttcctgtgcctgcgatacaggcacaacacatgcagtaaacaatagcatggctaataaatgtattttcttcatagacagcagatttaatagaaagtaaccggatcgctcagccgttcaaccgtttcaccgctttccattgtcagcactacacgaaaacggaactctccgcctgattggggaatggtcaataacgccttatatatcttatttacttcatctatcatggatataactcctccattaacagtaaaatctgtctgctgatctttaacaaacgtcttcggatagtcataaaagcaggaagtgacttctgcccctgtgggaaattcttcattaaaagctgtttccgtaaatatctgaatctttttgatgccatccgataatacatggcgaagataatgatcggcgtcatgagattccggatctttttcccccgcatctgtcagcagacgaatctccatcatataagcttctttgagaactttgttatcaacagcctccttaggtttctcacctgcattatcccaatgatataactccacttctttcaaagtgcaggaaatgtctatcggttcagcccaatcctgttcatcgcaagtcatggctgtcaccaccagaaacagtaatgatagtagtagctgagtcaagtgctttttcatacgcattattctattagttttcacaaagttaacctttttctaatagaaaaatgcgccaaaaagccttttactgcttattggcgcatttttttcttgattttatatcggttagtccagcgtaaacttctgagagccgatcagattaccgccctcgaagatatccaaacgatagtttccggcatacaaaaactcttctacatcccagaatacattcacgttctgttcctcaccgttgtattcgatatactttttgatggagtaagtcagtgtacggttttcgtaagagaaagtgttggatgcactcttggtcagtgcgtcattatccggtttggtgatacgtatatagatggtacgttcgccattctctgccgtaatattcttcacgactgtaaagctgatagccagcttcacgatgtctttcactttctttgcaaccttcccccgtttattgcgcggttcgatacggatattggtcacatcgagctgggcagccagtgtcaccttcttatccagattctccttttctttggaaagtgtactgatttgctgtgaagcagtgttgtatttctgagtaacgtctgcaatcacctgttgctgacgtttattgattctgtccagtgagtctatctgattgacgtagcctaccaatatcttacgcaaagtggcaagctcctttttcaaacgacggatttccgttgcattcgagcttttcacggtacggagttcttcgagcaatcgttgagttttcaattgctcctgctccagcaacagtgcgagagagtcattagttaccgtaaactttaactcatcatacttttgcacaaactggctatactcattctccaaatcttccttatccaactgaaattcctgtaccagctcgcgattggctttctttgcagtaaacaacaaataagtgatgccgataatcgctatcaccaaaacagctacagctgcaataagaaggctttttttgttcatagttccaattgttaatcgataacgggcacaaaagtaatcatttcgtaacagagtaacatagtcttgggcattttctttaacgaaaattattacggaaaaatttctttaattaggattatcgttgtaattttgtcgcgctaaaaagcatgaaataaattatcaactttttaaatatatagtattatgtcaaaagtaaccgtagtaggcgcaggtaacgtaggtgctacatgtgcaaatgtacttgctttcaatgaagtagcagacgaagtagtaatgctggacgttaaagaaggcgtttcagaaggtaaagcaatggatatgatgcagacagctcaactgttgggtttcgacacaactgtagtaggctgcactaacgactatgctcagactgctaactctgacgttgttgtaattacttcaggtattcctcgtaaaccgggtatgactcgcgaagaactgatcggtgtaaacgctggtatcgttaaatcagtggcagaaaacatcttgaaatattctcccaatgcaatccttgttgttatctctaacccgatggatacaatgacttacctgtcattgaaagctctgggcttgccgaagaaccgcatcatcggtatgggtggcgcactggacagttctcgtttcaaatatttcttgtctcaggctttgggctgcaacgccaacgaagtagaaggtatggttatcggtggtcacggtgatactactatgattcctttgactcgcttcgctacttacaaaggtatgcctgtaactaacttcatctctgaagaaaaactgaacgaagtggctgctgctactatggtaggtggtgctactctgactaagttgctgggtacttctgcatggtatgcaccgggggcagcaggagcattcgtagttgaatctatccttcacgaccaaaagaagatgatcccttgttcagtatatctggaaggagaatacggtgaatcagacatttgcatcggtgttcctgtaatccttggcaagaacggtatcgaaaagatcgttgaactggatctgaacgctgacgaaaaagctaagttcgctgccagcgcaaaagctgttcacggaacaaacgccgctttgaaagaagtaggtgctctgtaattagcaatccccttacatttatataagctaagaaaggctgtccttcgctatgagggacagccttctttcttttctatccaatagctgtcattcactctttacattctgagaaacccacattccaatgtcctgtttactcaaagcagccgccataaggtccggaaacttatccggagtacaggcaaatgtcggcactcctatggaagcgagaaactcagcatgccccttgtcgtaggacggagcaccgtcatcgttcaacgccggaagaacaatcaactgcacaccgctattgaccaacgagacaaatttctttctcatttctctggagtctcctccttcgtaaaggtcagtcaccaacaccatcaccgtgtcctgcggacgggtaatgactccctgacaataagtcagcgcacgggctatatcggttcctcccccgagctgtaccccgaaaagcagatccaccggatcttgcaaatcatccgtcagatcaacgactgccgtatcaaaaaccaccatacgggtagataccgccggaatggatgccaacacagaaccgaatatgccggaataaatgaccgacgtccccatagaaccgctttgatccagacacaggataatgtctttcatcgctttccgtttacgcccgtaaccaatacggatttcgggaataatcgtcttatagtccggttggtagtttttcaggttcttggtaatggtcgttttccaatctatctcattgtaacgcgggttcctgcgacggctggaacggttcaaagcaccggttaccgcctgttgcgtaggagccgacagtttgcgaagcaactcctcaaccaccttgcggactacctggcgtgccatctccttattcttttcgggaatcacccggcttaacgacatcagggtggcaaccagatgaacatcggggacgaccgtttccagcatttctttttcggtaagcagactagtcagattcagacgttttatagcatcccgctgaatcacctgtaccactgtctgtggaaagaactcacggatatctccaagccatcggcttactttgggagccgaggaacccagcccccctcttctgtcactatcatatacagcttccagagaatggtctatccgctgttcttccagattcaatgtcacgcctgtaccgtcagcctcatcgccgcccagtatcagacgccaccttttcagtaattcttcttccatcttctttcctttactttgtttccagtcccaataattgacgaatcacggggattaccttctttgcttcttcccgattcaggcactcattctccgttaccgaagctcctacggcagatgaggtgcccgtagaatccgtacgacgggctttctcacccagcttacggcgttcggcagaggtaaattcgctgaaagtacgccttaatacaggcaacagttccataaatgtttctttgtcctgcgaacatacccagttattcaccaaattccagagacggtcgtccagcaacaggatcgaaccggatgaacgtaaaaagccttcgaaccagtatgccatatctgccggagcattgccaacggaagaataaaaactgagtgtcgtctccatctcctctgcggagatttcccctttgtcattcagcagacgggtagcataaccggacaacaacggatgcacattggcagaagaacgtacctgaccgatgaaattgcgccacatcaggttcagttcttcccgattcagaatggagagcgcatagtccgtggcaaccaatttattcagaagatcaccggcagcctcttcatcaatattgatacacaccaatacaccacccgcaagaatacgggcaatcatggcttcgagcatatcaccgaccttcgagaaatcaaggtcacgcacgtttccgtaacggacgatattcaccagatcggggaccgcctccatcatttccagaatatcggtagaagcagccgaaagacggtccaactgtacggtcatcgcttccaccagcgccggaagatcggcagggaggaccgtactcaacaaagctgtcagttccgggatatgctgaatctccgccatctgtttcaacagatatttctgcgtagcttccatcaccgtgtttccccagatagcccgttcaatgatttggatgatttgttccggtttgtgatacaaggtccatttttccttgaaagtacctttcccgtctatccgtccgaggatagtccagtcaatgcccagcagttgcaggcgatggaagaagatacttcgctccagatcattcggcttgcggaggtctaatatcagttctttgatctcggcggtgaacggaacacgcagacgtttttgtattttctccacgtctaccagcagaggcactttgggaacgtcatcaggtacacttcccaagcggttgctgatgatcagttcttctttgataatctgcaacaaaatatcatctccgaagcccatcaccgtagtgacagcttcgttatattcattcagagaaggataaggcagatctctcaaagcagccgtcacctgtgccagacggacggtttcaataacatgggctaccgagatatccatattcttctgccgcaacagggaggcgatccggctcacccaaagcgtgccatcatcctccggatgatgccagagataatgataccagcccggagattcgattcccgcaccgtacccgctgcggaaagcaagccggtcatacgtccacggaatccatgtacattctacctttactttgggaagtcccttcagtagttcattatcgtcctttactttgggcatatcgtccagtgcgggtacatgccatgcaccacagacgacgacaatacgttcgaaattctccttctgtgccgcacgtatcattttacgcatccacgcttcacgtatcaggtcacgcggagaggtgtgccccggaagttcttcccgaagagcagtcacagcctcttgtaccgcctgaaaaatatcggcaggttcttgccggtgttcaatcatagtttcccaccaggattcaccatcggtaaatcctgcggcatgagccagccagtcgaacgggtcgccggcttctgcgacttcagcggtcgtttccgtctcctgttcagaggtcttttgtgcccgaagagccagcgaatagatcaggggcaagtcgaaaaagcggaaaggtatccggttctgtacggcataacgcatcgcctgccactcgggcgagaactccgcaaaagggtagaacactgcattctgaggctcgtccggctggtatgccagcaaagctaccggaggcgtcatctgcggattttccacacagggcagcagcgcttcagcttctgccggaccttctaccagaatcagatccggttgcagttcctgcaagtagttcagcacattgcggcacgagccgggaccgtgatgcctgatgcctagtaaatgaatagccatttcttcctttctttttaaatcatatcccttgaagcacggtaaatatctttccagccgtcccgattcttcacgaccgtttccatatattcctgccaaacgactttatcctgtacggggtctttgaccactgcacccaaaataccggatacgagatcttcagcatgaatttctccgtcaccgaaataacctgccatcgccagtccgttgtttaccaccgaaatagcctctgccgtgctaagcgttccgctcggagtcttcaatttcgtcttaccgtcggcagtagcaccctgacgaagttcacggaagatagtaacgacacggcgaatctcctccagagcaggcttttcagccgggagctgcattactttctcaaagctctctacccgtcggcgaacaatatctatttcttcatcaatagaatccggcaagggaagaatgaccgtattgaaacggcgcttcaaggcgcttgacagatcattgacccccttatcccgattattagcagtagcgatgatattgaaaccgcggattgcctgtacttctgtattcagctccgggatgggcaatgtcttttcagaaagaatggtgatcagtgtatcctgcacatcggaaccgatgcgtgtcagctcctcaatacggcctatcttaccttcctgcatagctttcattaccggagtttgcaccaatgcccccacactcggaccttccgccagcaaacgggcatagttccatccgtaacggatcgcttcttcaccggtgccggccgtaccctgcactatcaaagtggaatcaccggaaatagcagcggcaatatgctcgctcacccagcttttcgcagttccgggcagtccgtaaagcagcagcgcacggtcggtgacaagggttgccacagctatttccatcagacgacggttacctatatatttaggagaaacttcaaacccgtttttcaatttaccgcccatcaggtaggtaaccactgactgcggagacatctcccaattctccggaacgggatttgtttcattctgtttcaactcgtgaagttcttctgcaaattgctgttcagcatgttgtcttaataaagtgctcatatcttctttctgtttttattagtcattatttaataaggtatctattctctgcttcaaatccatgtattccatcatcaaccggcaaaaacgagtggaggtattattctcctgtgcggccgttgcaagcgctgtctgttcgatgggttttctcatctcggacgggaaatataatgccagttgttcggctgtctccttaggaagatagtaattattccgaagcatccgctggaatacacgggtggagaatttcattccccatccgatgccgtcttcgttgaaccagctatccggaatatagccgcctctgtccgactgaaaagctatttcctcccgttggaaggaaggcaataaacccatcaacgcgtccgccattttttcatccgcattctccttcaaggtatgatatgcccaaccggagtcgctgaaattcaggattggtttcgacaggtcgaacagtttctgaaaaggagggttcttcgccagtttgccggcagccttctccggcgcacagtcataaaactcactccagaaacttaatggaacacgttccgccaactggcgtaacaagaaacgatcatccttctcgtttttattggaactcacttcttcaagtcccaatttcttcatttcaggggtaaattcaatcttatcatacgaccatcccaaaaggaaattgaaatgtaatttcccccgcaataattcttcgtatattttcaccagttcggagtccggcagactacacaataatcgccgggccgtttctttgacattactgctccggtcggtcgccacgatctcttgcaggaatgcttcgtctgatttactcaacccccaccgcaaacactgaatcagttcatcccgatgggcagccgactcattcttcagttcggtctgcaataaggcaagcccctgctccggactatttttccgcagattggacaacattcgtttccgttcttcgtgagaggcggtttcccaagtttcattaccggattctccccatacgggaaatcccatttgcggaagaagccaacgtcctctttgccctgtcagcagagacagccagtgctgttcctcatacctgtagggattattccggtcaaaagctcttcgcaataaagtttgcagataggcaggagggatcaattttcctttgtcggcagctttccggtaagcatacagcaaaagagactgatttttattgagatacagggaagtaagcaactctcccacttcacggaggaagtaaggtttgtcttcttccggagcttctgtcacattgacaactcctgcaatggattgcgcttccactccggcacgtgcaaaggcaaagcccaaagcggactgctgatagaagagagcttccgcatcctctgctttcacctgaatgtcgcggagagtttcttgcaactcttccggaaaatcagtcgttatcagttcacgggtggcagtgccaagcaatgccacattgatgatatgatcagttaagttcatctttccaaaaataaaattcagattgataccagattgttttcaattcacaggaaacggcgtctgccagcaaaaaagccgagaagggttttccgcctgttatagccagtatgtcaacacgtgcagtctcttcgatatgcaccggaacggccatacctccggcatcctgcagatagtgcgtatttccgcttgttaccagcctgacattgtccaccaagagaggaacttcctccgcaaacggatgagtctgtataactgctctgtaagattgcatggcaaccggtatatcggcacacaatgaaggcaggaaggtactatccagccatttcatgtttttgggcagggcacgcaaggcaccaacaccctgataaaaatacaactctccttcatagacaccaccgggaaccagattaaattccggcaacgctccgggagccagaaagtttaaatagagggccatacggtgactggacttcccgtacaaccagaaagtttctgtccgcagctcatttatcttccggcttctggtatgcaaaacgatccattggtctgccaccggtacgccggacatcacttcttccttcgcctgcggatatcctacctgagtacggatttccgtttgccactcagcagaaagagaatccagattcttataactttctgtcagaagatacagtttactcaatttgtcggtaagctcatatttccaactgtctgtatagtaattgatttcctgtagcgatcgtaacctgcccgccaatccgccggcctgcgcatcaatcatcctgcgggatatgggttcaaatagtgtatgtgctctttccgggatattcagcagcccgttgcggagcaagtctttcatccagatctgaagatcatccattccggccaataccttctgatggcgcacggcctgcctcttggcctgtgccgcttcatccaccggagtttccgatttctctttccgttctttcttctccgccttctcttcacgtttggagagccatgccgttacccagtccggttcctccgcttccttaaaaagatcagcatgggaagcatacataaataaaagccccaccccatgtttacacggaaacttacggctgggacaagaacatttgaatgcaatattctttgtatcaacgactgtttgataaggcgtttttccacttccttggcagtgtccccagatggcgcggtcactatgctccagaagtacccacttagtccggttcgccagcccttttcctgctttgacagacgcagcgtccggagcgagttgagcgatttgttcttctgtcagatttaataacattatagtatgtttatcatgtttcaaaatgcaagtatagcatattttccaaagagaagcatttaaaaaaagctaattcattttgcgttttcacagaaagcacatacatttgcatcgttgtttatgcaattattgtttaagtcaacaagtataaaaaaatgaactatctcaataaacaatttatatgataacggggttatttaaaaaagaagtatcaccttattaatatgtaagatgcgatgaaaaaactatttcttctgacaattctgttgagcctgacttttatagtaaaagcgcaaagcttcctaagcctagatagttgccgcgcattagctcttgccaacaacaaagatctgttgataagcaatgaaaaaataaatgccgctcattatcagcacaaagctgcatttaccaactacctgcccagtttctcggctacgggaacttacatgagaaatcaaaaagaattttcattattgaacaatgaccagaaagcggcgctttcgggattggggaccaatctggccggtccgatacaacagacggccacagagattgctaccgcacacccagagttgagaccgcttatcgcttctttaagtgaaaagttaggagctgccttgcccgccctcgaccaggcaggaaattcactggtggatgcgctccgcacagatacaagaaatgtatatgcaggtgccatcacgctgacacagccattatacatgggcggcaaaatccgtgcatataataaaatcacaaagtatgccgaagaattagcgcaacagcaacatcaaggaggcatgcaggaggttatcatgagcactgaccaggcttactggcaagtcatatccttagtgaacaagaagaaactggccgaaggctatctcaaacttttgcagcagctggacagcgatgtggaaaagatgattgccgaaggagttgccacaaaagccgacggtttgtccgtacgtgtgaaagtcaacgaagcggaaatgacactgactaaagtggaagacggattaagcctggcccgaatgttgttgtgtcaactatgtggcattgatctcagctctcctatcacgttggcagacgaaaatatggaggacattccactgctcacaccagagacccacttcgacatgtccaccgcttacgccaaccgtccggagatacgcagtcttgaactggctactcagatttataaacagaaaataaatgttacccgcgccgaacatcttccgtccattgcgttgatgggaaattatatggtgaccaatccttccgtattcaacagctttgagaataaattcaaaggaatgtggaatgtgggcgttatggtacagatacctatctggcattggggggaaggcatttacaagaccaaagccgccaaggcagaagcacgaatcgcacaatatcagcttcaggatgcgagagaaaagatcgaattgcaagttaaccaatccgcttttaaagtaaaggaagccagcaaaaaactggtaatggcaaccaagaatatggaaaaggctgacgaaaatctccgttatgccaccttaggcttcaaagaaggggtcattgccaccagcaatgtcctggaagcacaaacagcatggctgtccgcccaatcggaaaagattgacgcacaaatcgacgtgaagctgacggagatttatctgaagaagtctttgggaacgctgaaataatggacaattgacagttgacaattgacaattaaagactgaggtattcaatcaatttattattcgtaatttataattcatcaataatatggcacctataaaatcacaaaacagcaatatgctgcttgcatttcttactttactgggagttattgcaatcgttgcagtcgttggctttttcatgctccgcaaaggtcctgaaattattcaggggcaggctgaagttaccgaataccgcgtttcaagcaaagttccgggacgtatactggaatttcgtgtgaaagaaggacaaagcgtaaatgccggagatacactggctattctggaagcccccgatgtagtggctaaaatggagcaggcacgtgccgccgaagctgccgctcaggcacaaaacgaaaaagcaatcaaaggtgcacgtgaggaacagattcaggcagcctatgaaatgtggcagaaagctcaggccggtgttacaattgccgaaaaatcatacaagagagtcaagaacctgtatgaacaaggagtgatgcccgcacaaaaactggacgaggttaccgcacaacgcgacgctgccatcgctactgagaaagctgccaaagcacaatatactatggcaaagaacggtgcggaacgtgaagacaagatggctgccgaagcgctggtgaaccgtgccaaaggagctgttgccgaagtagaatcttacattaaggaaacctatctgattgctccggctgccggagaagtttccgagattttcccgaaagtaggcgaactggtaggcacaggtgctcctatcatgaacatagccgaactcaatgatatgtgggtgactttcaacgtacgcgaagacttgctcaaaaacctgactatgggagcagaatttgaagctgttgttcccgcgctggataataaaacagtcagactcaaagtatactatctgaaagacttaggtacttatgccgcctggaaagcaaccaaaactaccggtcagttcgacctgaagacatttgaagtcaaagcttctccgatggaaaaagtggaaaatcttcgtccgggtatgtccgttatcattaacaaataatcatgaaagagagaaagaagaaatatgtagccttatggcaagtcatgcagagggagtgcaggcggttagtatcacgcccgctctatctcttttgcatggtcatcgctccattgttctgctacctatttttcacgaccctgatggattcgggacttccgcagaatcttccggcgggcgtggtagacatggacgactcgtctacttcacgcaacattgtccgcaatctggatgctttctcgcaaacaggtgtcgtagctcattacagcaatgtgacggatgcgcgtatcgctgtgcaggaaggcaagatctacggtttcttctatatcccgaaaggcttgtcggcagaggcacaaagccaacggcagcccaaaatctctttctacaccaattactcctatctgattgcgggttctttactattcagagacatgaaaatgatgggagaactcaccgccggctctgcggcaaggagcgtactgtacgccaaaggggctacggaagatcaggctatgggcttcctgcaaccgatcgtgattgacacgcatccactgaacaatccgtggctgaactattcggtatacctctgcaatacactgataccgggagtactcatgctgctcatcttcatggtcaccgtttattctatcggtgtagaaatcaaagaccgcactgcccgtgagtggttgcgaatgagtaacaattccatttacattgctttggcaggcaaactgcttccgcatacggtggtctttttcataatggggatattctataatgtatacctgtatggttttctgcatttcccctgcaacagtggcatcttcccgatgatattcgccacgctctgccttgtattggcatcccagtgttgcggcatcgtcatgataggtacactgcctacactccgcctcggattaagttttgcctccttgtggggagtgatttcattctccatctccggtttttcttttccggtgatggcaatgaatcctgttttgcaggctctgagcaacctgtttccgttacgtcattatttcctgatttatgtagatcaggcgctcaacggatacagcatggcttactcatggtccaactatatggcattattaatattcatgatgcttcccttctttgtggttcaccgcttgaaagaagcattggtttactataaatacataccctgatgaaagatataaaatttaaagacaagatagcccaaggcatcaacgacctgttttatatctggaagcgcgagtttcagacaactttccgcgaccagggggtactgattttctttatcctcgtcccactgggctatccgttactgtacagctttatctatgacaatgaagtggtacgagaagttccggccgttgtagtcgatgactctcattcatccctgagccgcgaatatctccggaaggtggatgccacaccggacattcagattgttgcctattgtgccgatatggaagaagccaagcaaatgctgaagaaccggcttgcatacggcatcatctatatcccatctgatttcagcgacaacatcgccaaaggaaaacagacgcaagtcagtatctattgcgacatgagcggattgctgtactataaatccatgctgatcgccaatacgaccgtatcactggatatgaataaagatataaagatcgcgcgtagcgggaacacgaccgagcgacaggacgaaatcaccggttatccgatagaatatgaagagatttccatctttaatcctacagccggttttgccgctttcctgattcctgccgtattggtactgatcatacagcagacactattgctcggaatcggactggcagcaggaactgcccgggaaaacaaccggtttaaagaccttgttcccatcaaccggcattataacggaacgttgcgaattgtacttggcaaggggctaagttacttccttgtgtacgtactggtatcattttacgtgctgcatatcgtgccaagactattcagcctcaaccaaatcgggcaacccggttcactggtattatttgtcgccccctatctggcagcctgcattttctttgcaatgaccacctccatcgccattcgcaaccgggaaacctgtatgctgatttttgtattcacttccgtaccgctgctgtttatttccggtatctcgtggccgggagccgccattcctccgttctggaaatatgtttcttacattttcccgtccacattcggcatcaacggctttgtgaagatcaataatatgggagctactttaagcgaagtcgcctttgaatacaaggcactgtggatacaagcaggcgtttatttcctcaccacttgctgggtataccgctggcaaatactgatgagccggaaacacgccatagagagatataaagaactgaaagaaaaagagaatctggccaaacagatgaccgattgagacaattaaaagggagagagtttagtacgatgtgtgcttcttcggaagtatacatcgtttttctttataggaagagaaaattctttatgggaggaaatgaaaaagtcctccgctccatctattgggcagaggactttatgaatggtattataaagagaatataattcaattagaatttgtaacctactccgatagagaagttgatgttcttaggagagccactggcatcatacactttagtcaaaccaaattctccggtcaggtcgacaaagaatctgttgatttcgtaagcaacacccactccaagtccgaagtcaaatcttttacctccgctgttgtcaccaaagaaatcttccttaacgccattcatcttgtatttaccggcaataccgcatgccagatacggaccggcttttacaactacattttgtccgtctaccacagcaaatcttgcagcagccattaccggcagttccaggtacatcggattagccttgatatcacccagttttgcacctttctgagtaaacatcaacgaaggctgaatagaccacatatcagtaaactgatattccattcccactccaacattaaaacctactctcatgtccgtatcagcgtctcctgtgaaattactcatgttcatacctaccttagcattccaggaaatctgagaataagaaacgatagaaacaagtgcaaacagcacaaaaatcaaaccttttttcatatcagtcatttttttagtttgcctccctcctccctccgggctgcatagttaatagcttcattatcgagtacggggaatctttcaagctttgctttgtgttgaaacgcactctccttttattaacatacgttctattatactctacaaaagtatttcatttattttatataaaaaagccacgataggctttttgttcacctaaatgtcctaaagattgcttatttggatgaatataacgtttatccacattattttcatgcttacgagaattaggggcttttacccgcaaatcaccccattccaaacaggcatttacaatatttaaccgactagctattgctttattacgaaatattcgtagctttgcgaaagaatcgtaattaaacatcatctccatggaaaagttaactatacaagaagaagaagtaatgatctacatttgggagttacaagactgtttcgtaaaggacatcgtatccaagtttccgcaaccggcaccaccttataccaccgttgcgtccatcgtgaaaaatctcgaacggaaaggatacgttaaatcgaaacatatagggaatacctaccaatatactccctctattcgtgaaaatgaatacaaacgccacttcatgagtggagttgtccgcaactatttcgagaactcctataaggaaatggtttctttctttgcaaaggaccagaagatatctacggatgaccttaaggacattatcgaactgatagagaaaggaaaagaaaaataaactgaaactttatcgatatgactccggaacttgcctatttcttaaagataaacgtagccatcgcattgttctacgctttctatcggttgttttttcataaagacaccttcttccactggcgacggaccgctctgttatgcttctttggcatctctctgctctatcccttactgaatattcaagagtggataaaggagcaggagccgatggtggcaatggcagatctttatgctacgatcatacttccggagcaaatcatcgaggcaccacaggaaacaacggccaattggcaggagctaatcccacaaattctgggatttatctactggaccggtgtattacttcttaccctacgcttcctgatccagctgggcagtatcatacgattgcatttcctatgcccgaaaagcacgatacaaggatcacgtgtacacatattgaagaaaggtacaggacccttttccttcttccactggatattcatacatccggaatcgcatacagaatctgagatcagcgaaataatcacgcatgaagagactcatgcccgccaatatcactcagcagatgtactcgtcagtgagatcatgtgtactttctgctggttcaatcccttcgtctggctgatgaaacgggaagtcagaggtaatctggaatacatggcagatcaccgggtattagagacgggacatgatagtaaatcataccagtaccacttgctgggactggcacatcacaaggctgcagcaaatttatctaatagtttcaatgttttaccacttaaaaatcgtatcaaaatgatgaataaacgaagaaccaaagaaataggaaggactaaatatctgatgttccttcccttggctgccctgttgatgattatcagcaacatcgaagtagtagctcgtacaacgaaagaatttgccaaagaaatgatggcagcaccggaagaacaaggtgtttcgcaaaccgaactcgccaatggtccggaacttcccgatggaatgacgggagtagcgacattacaggataaaaaaggaacgcagaaaacaaaagaggtagctcctcctccccctccggcacccgttaaaagtgctactgtaaatgattctgtcgtatttgaagttgtagaagaaatgcccgacttccccggtggacaatcagcactgatggaatatctcgccaagaatatcaaatatccggcaacagctcatgaaaatggaaagcaaggacgtgtgattgtgatgttcgtagtcaaaaaagacggtagcatttccgacgttaaaacagttcgaggcgtagacccctatcttgacaaggaagctgaacgagtgattgctgccatgcctaattggaaacccggcaagcaaagaggacaagctgtgaacgtaagatttacggttcccgtaactttccgtctgtccggtccggaacctgcaaaaccggcagaaacacccgaagcagtagcaatagaaaagtttgaagaggtcgtagtggtgggctatggtcctaaagaagccacacccaataatgaaccaactttcaaagtcgtagacgagatgcctaaatttcccggaggacaggagggattaatgcgctacttagccaaaaatataaaatatccgactatggcccagcagaataaggaacaaggaaaagtgctggtccagattgtcatcggaaaagacggtaacgtgtcgaatataaaaatattagaaggtgcgtcggcatggttggacgctgaagcgattcgtgtagtgcggggtatgcctaagtgggaaccgggaaaacagaacggacaagccgttgccgtagaatatacattccctattacattccgacttcaataagcaaaaccgaaaatatcattattcccctaacaagtaaataacagaaaaaaggagcaatcgtaaacgattctgctcctttttctgttttcgcatagataattacaataatatgattacatttgttggagataaaagcctaatcgtatgaaaagattcgcattaatgataagtttgctgctaagcatactttgtatgacacaagctaaagacagaatcgtagaacgtcctccctttttagctcagagttcctcaagtatagagatagacaaaattgtcatgagtgacacagtcaccactgtgtatatcaaagctttctatcggcccaaatactggataaagatcgcaaccggcagtgtactgaaagacaacaatggcaacctataccctgtccggaagggaatcggcattacactggacaaagagttctggatgcccgaatccggcgaagccgaattccaattaactttcccacccattcctcaaaacgtgacttgcctggatttctctgaaggagactttgagggagcatataagatatggggcatacagctggacaagaaaacattcagcaagttcaaactgcctaaagacgttacagtcaccaaagcagaccataaaacgacgctgcccgaaccagtcgttaaatacgccaaagcaattctcaaaggaagaatccttgactaccaaaaagggatgcccaacaaaggcagtctttattttcaagatgtaataagagacgaagctcaggaaggaaaaatccgcatccaggatgacggaacgttttatcatgagatgaatgtcttcatggtcaccccatgcatgatcaggtttccttttggagctgtcagctacttattagcaccgggagaaaccacttcggtcgttatcaatcttcgcgaaaatgcccgcaagcagtcacatctccgccaagcagaaaagccatacggaaaagaaatctattacggaggttatttagccggagtacagcaagagctggctgatcatcctatgagtttcagtttcactgaaggtaatagttatgaagaataccaacaacagattaaaaagctgaatggtaaaacagctgaagaatataaagctcaaatacttgcccgactccctgagttcagaaaacaaatcacacagtcgaaaggaagccctgcatataaggagattattaatacagacctcgaattgtctgccgcactaaagattatcgaaactgaaaggaacttgaaattagctcatatcatgacgaatgggctggaaggagaaaaagcaaataaatactatgccgagactaagattgatattccgcaaggatattatgaaagtcttcaggacttcacgtatatcctttcacctaaagcctgttacaacagcagatacccgatactgtttgacatcatacgccgtataggtatagatgataagattcttaagagtctgagcaatcatacagctgccagttacttaatacaaaatctgaaggcacagatgattggagtctccatgagagatctcaatccacttaacgataagcaaaaggcagaactgtcaacgatgcccgcagcatacaacgacatggctctggctatgaacaacgacctgctgaaacaaatagaaatcaacaagaagaaaacaggattcaccgttaatgagacaggagaagtttcgaatgaagatttattcccctccattatctccaaattccggggacatacgctgttagttgatttttgggcaacatggtgtggtccatgccggtctgccaacaaacagattctcccgatgaaaaaagaactgaaagacaaagacatcatctacctttacatcacaggtgaaacgtctccgctgggaacctggagaaacatgattcctgacattcacggagaacatttccgtgtgacggatgaacagtggagctatctgcgcgagaagttcagtatccggggcgttcctacttactttgttattgacaaagaaggaaacatcacttataaacagaccggattccccggagtggataccatgaaagaacaattgatgaaagcattggaaaagtagaatcaccaatcgcaaggtagcaacaagctataccaatatataccataagataaaacaacctcccgatgacagacaaaagtaacatcatcgggaggttttatatttaaagtaaataagagcacttatttgtgcatctctacaatcttagtcggagccatctccacattccggcgatctacctgacgaactacgctggcagccaatgacaagaaagcgcgaccggttaccgtatcttcatccagcgccaccggagtaccattgtccccaccttcgcagatactttgtacaataggaatctgacctagcagaggcacattcatttcttccgccagtttcttggctccttccttaccaaagatatagtacttattctccggcagttcggcaggcgtaaaccaagccatattctcaaccagtcctaaaataggcacattcactttatcattcgtaaacatattgattcccttgcgggcatccgccagcgctaccgcctgcggagtactaacaacaattgcccccgtcattgccaacgtctggacaacagtcagatgaatgtcacttgtgccgggaggaaggtcaatcaggaaataatcaagatcaccccagtcggcatcgccaatcagctgcttcaatgcgttgctcgccataccgccacgccagagtgtagcctgatccggatcaacgaagaaaccgatagaaagcagttttacaccgtatttctctaccggaataatcaagtcacgtccatcgatcttttccgcatacggacgggcatcttccacctggaacatcttcggcatggaaggaccgaaaatatcagcatcaagcaagccgaccttgtagcccaacttagccaaagccaccgccaaatttgcggatacggtagatttacctacccctcccttaccggaagaaataccgattatattctttacttgcggaagcagtttgcccacttccggacgggctgcctgcttgctttccgttgtaatagttacctgcacatccggtgatacatacgtatggatagccgtttcagcagccttcaacattgatttcatgaacggatcggtcggcttttcaaatatcaatgaaaagctaaccgccatgccatcaatacggagattatcggcgaccatctccgcttccaccagattctttcccgtaccgggataacgcaccgttgccagcgcatccaatattaatttcggataaagagtcataattagttcagaattgagagtggaaaattgatagttccacccaattactatttattacttgttacttattacttgttacttattacttatcatttgctcgtttgcagtccgctccgcttgctacggttgtagctacggtacggatcaagttctatttccacatccggttcctgcaaaactccctcttgcggaaggcggaacttgatatatttgatatttaaaccacgatcgagccattgttgttcatagtaagtcttaatactcaggatatcgtctaccaaatccgaatgatacaaatcttcggtgataaactcgacaggaaactgattggcttctatcatgtactttgtataggtgaacataaagttactgtcggttttcagatggatgattccatccggtttcaggaatttacggtagcgctccatgaagtaagtggaagtcagacgcttagtagcctttttcatctgcggatcggagaaggtcagccagatttcactgacttcacctgctgcaaaaaagcgttcgataatctcgatatttgtacgcaggaaagcgacattcttcattcctgcctgcaaggactccgtggcgcctgtccacattctggaacccttgatatcaactgctataaagttcttatcgggaaacatccggcccagtccgacggtatattcaccccgtccgcagcccagttcgagcacaataggatgatcatttccgaaaaactcctgatgccattttcccttcatgtcaaaaggcacattatccaccgccgaataaggatattcgaacacgtgcgggtaactcgccatatcggcaaacttctctaatttattctttcccatctcattactgattaggacgcaaaggtacttacttttggcgtaaactacaaaaataaatggagtacagattgctccgtactccattctatagaatgatatttattcgcttatcaactttcgacagtcacttctacattgatattaataccaccctgctgagctttcaaatcttcatagaaagcagcatgagatacttgcacgtagggttgcaaaacgaagaatccgataccgaaagtaaagaggcaaaggatagcccaaccgatgaagctcaaatcaagcaggaacaatttcatcttgttgccttccatcattgccatacttctttcaatggcagcattgttacacaattcaggttcgtctttcagaatatagtccgtcatcgcataagaataatgcttaatgatacccggaatcagcaacagcaatgaccacaggaaagtataaacagcctgcagcagtttagtagtcaagatacgactatattcctgaaatcctgcgaacaacactcccagatcaacctcttccgctcctctgaatacagccagcatcaaaatagcaaagccgtatgcaacaggcagtccgaccaacaaagacccgatccatccaataaaaggaatggaagacaaaccaccggcgatagccgaataaataagagcagcaacggctgccataggccactttccacgaagggcttcacgtgcttgagcacgcaactctgaattttgtttcaacatagtaattacgcaattaaaagagattatacttaaagatcaattattccacaatcgtcacccaaccatgtgtatccggttcgtcaccgtactgaatgccacgcaacttattatacagtttcgtgcagaccggtcccggcttgccgtccttagagataacatatgactttccgttctccaggtcatcaatacgctgaatcgggctgattaccgcagccgtaccgcaagcgcccgcttcttcaaacgtttccagttcttcttccggtatcggacggcgttctaccttgatgcccatatcttctgccaactgcatcagactcttgttggtgatcgaaggcaggatagaagatgatttcggagtaatgtacgtattatctttaattccgaagaagttcgctgcgccacactcgtcgatatatttcttttcttttgcatccagataaaactcgcaggaatagcccagatcgtgcgctttcttgttggcacgcagactggccgcatagttaccgcctaccttgtagataccagttccatgaggagcggcacggtcgaactcgcggataatcacatacggattggtagagaaaccacctttgaagtaaggccctaccggagttacaaataccacgaacatatattcttcggcaggatgtacgcctacctgggcacttgttccgatcagtaacggacgaatgtatagagaagcaccggtttcataaggcggaatgaaacgttcgttcagctttacaactttcagaatcgcttccttgaaacgttcggtcggcagttcggccatcagaatgccctgacaagtagattgcagacgtgccgcattttcttccagacggaagatacgtactttaccgtctttgccgcggaaagccttcaaaccttcaaaagcttcctgaccatagtgcagacaagtagctgccatgtgcagattgagatgttcatcactgctgacttccagttcgccccatgcgccgttacggaaattgattctcacattgtaatctgtcttcatgtatccgaacgacagattcgcccagtctatttctttcatatcgttatgtattagtttattttacgctttgattcgcaaaaataacttttattattcagactgccgcctttcttgcaacaatttttcgacttcccgatccgcttttgtcagtttctcggtgcaaaaggcaataatttcattggcttcttttattttttcgctcaaagtgtcgatatccagttcgttgttgtctatctgacggactatcttctcaagacgctccattgcctgagagtatgtttcttttttagctgccatatttattgtatttaagatgaataataatgctcatcgagccggacttcggaagtgaaacttcccttagccagacgggtcactaactggtctccggggttcagcgaagcggcatccgtgaccgcttttccgtctttcagcgtgatgctatatccacgactcagcagtttgtcgggagaagcatccgccacacgttgccgcaaaagttccagtcggtgacgatgacgggacaacagggtctgagtggcttgcgccaagtcttttccggctgccagcaaggcaaagcgggcatctgtaagttttcggtgaacaaggttcgggatgcgggtctgaatcatttccagcctccgtccttcctgttcgagcagggcatacgccccttgttgcagacgggcggataactcttccagatgatctgccgattcggtgatccggtgaatcagaagttcggcagcagccgtcggagtcttcacccgggtatgtgccacagagtcgagcaccgtatcgtcccgctcgtgaccgataccggtgatgacgggcaacgggaactgggcacaagcggccgccaagaggtacgtatcaaaaccggataaatccgaagtcgcccctccgcctcgtatgataaccactacatcaaactcgttcacccggtcattgatgcgattcaatgcagccaatacggactcttccacctgattgccctgcatcaacgccggaaacagttcggtatagaaaaagaatccgccagaattgtgctgcaactgatgacagaaatctccgtatccggctgcggtggcagaggaaatgaccgctatacgttgaggaagaaccggcatttccaattctttattcaaagtcagtactccttcttcttcgagttgcatgagtatctcacgacggcggcgggccatatcgcccagcgtataggcagggtcgatatcgagaacagtcagactgtaaccgtagagttcgtgaaactggactgttactttcaccaggactttgatgccggaagcaaataactgtccagtagtttcctcaaagtaaggtttcagcaagcggtagatattactccagatcataccccgtgccttggctacgagattgttgctgcgcgggtctttctgcacaaactccagatagcagtgtccggtagtgttggaacggacatcgctcagttctgcctgtatccaatattcatcgggcaggcattgctccagacttcgccggacaagcgcgtttagctctagtagggaaagagaatccataggcataattaacgataaatgaatgacacatttctataatgagatgcgaatttgatatagcctaacaacgaagaatagcggaccgttcgttattctttgctcatttggtatgctttccagagatccggaatgccataaccgtagatgttgtccggaaaatcggatctgtcgcctacgctgcgcaccagttcgatcacttctttggcggtcaacctcgggcaggcctgccacaggcaagctaccattccgcacatgataggagaagagaaagaggttccgttggccagacgaagattaccgtctgtgcccactatatccgccttgaggccgactgctacgacatccggtttcacacgtccgtcggcagtattgccgacagaagagaacggggccagtaacttcttcttatcaatagcacccacagtcagtacattctcggcatcgcccggaggagtgattttcttccatgagccgctgccagagttaccggcactgcaaacgaggaccatacccttatctgccgccttcgaagcctcccttgacatcagtgcatagtgtccgttcaggtcacggtaacgatagttcttggtcgggtcgtcaaaggtataataacccagtgaggtattcacaacatccacgcccacactatcggcaaattcgatggctgccgcccagtaatcctgctctaccaaatgctcggaagcctcatcctcactgcgaagcaaccagtaggaggcttccggtgcggtgccgaccatgacattcggctgattcattgccatacaagacagtactgacataccgtggttgctttcggcatagatgtccgcttcggggttcacaaagtcgcgtgtcccgagtatgcggatattcttcatcgcttcgattctgtccgcattatgaaatccggcgtcgataacggcaatcgtcatgccctgtcccttgaatccggcatcgtggagaaggttggctcggctcatttcaatctgagtgatagcgggcccatacaggctgtccgaacgctgcggatcattgatcagcgaatctcttttggtaactgccgacacttttccctgccacactttctcggtggaacggacaaaaggcagtttggctatttcatcgatcagcatactgtcattgcaggagactgtaacgaaattatcccattttccggtgacaagcacatggacgcctttctttcgtatggcatctacatacttcttgcataccggcaagtcggtagagtcgatagccagcttctgtctcaacctgcggtcgatggattttctggaaaggaactcctccggttgctggatggaataagtggttgcagccttatctgtgaggctgatccgatatttcaaggtatcggtagaggtaaattgagcagatgctcccaccgctgtagtcaggatcaatgccgctaatactaatcttttcatctaaatctctctatttattttattctacaatttgtctttattctctatgatcaccagtccgatcccccgctgcgaagcgataaacgcaccgccaagtacccgccgtccatcgtagaacacggcagactgaccgggggcaacagccgaagccgtctcacgaaagcgcaccaacaagcgtccgtcttcgagacgtttcacccgacaaggtatcgggcggctgcgataacggattctcaccgcaagattctcgcatgagaacagttcttgctcatctactatccggtcttgttccgccagcatatattccgtctgcagttgttcggcatctcccagcatcactgtattcttctgcgggttgattttcagcacataagcgggcttgcccaaggcaatttccagtcctttccgctgaccgatggtataataaggtgctcccttatgctgtcccaacttcactccttcggagttgacaaaccatcccggaccgatctccgtatccagttccggacattgctcgcgcagaaaatcacggtaatctccctgaatgaaacagacttccatactttcgccttccttagacttagcttcatatcctttctccgccaagtactcacgcacctttattttcgtatagtcgcccaacgggaagatacaccgcttcagtatatcctgccccagccgccataggaagtaggactgatcttttttatcatcatctcccgctacaatatagatgtgcccgctccgctcttccagccgggagtaatgtccggtcgcaatgtaggcgcagtccagcttgtcggcccattccgccagtacacggaatttaaataaggggttgcacatcacgcacggattcggggtacgtccttgcttgtactcatcgataaagttcttcacgatggtctccttaaaaggtatacgctcgtcagccacataatgttcaattcccattcgtgcagccagttcgcgggcatcctgaggctcgtctccccaaacacgcatcgtgactcctactatttcatatccctgctcttgtagcatcagacaggtagcggtactgtctataccgccactcatgccaaccaatactcttttatttcgttctttcatccgaatttccaatcattagaagaatacaaaagtacaagattatagtcagacagccataaaaaaggaaatgaaaagtttgtgtcccctaatgaatgaacaggcaacagccccattgccatcatcagacaatcatttcctactgtctctttaattattcaaaacggtttaaaaatgattcaagatactactgactatcattcggcgcaaatccgtatgatttgtaatcagatgtatgaaagaagcatggaggacttgacaaaccgcttttaatgttgtatctttgtaagtgtaaaccggaagcaaattcaataacattgataatatagacgaaaaatgagcaataataagtattatataataacagattgcaggcattcccactccgggtaatgcttgttggatagtctgatacaagctaagggctgcgattccttatgggaattgcagccctttttgttgcttaaaatggatgtttattgcaggaataacgaaattagagtttataataaacttggaggacgtttataataaacgatgaaagaatttattaataaatgattggctgttaccgcataattagtcaaagtctttcgtatagatgtgggtgctgattttgaaagattctttattttctaggtaaatcgatgaattattgctacaatactacctttctctttttgtgtcattgatctgaacaccttatgatgttatgagaagaataatcttcggacttaatttttattttcgctttattagctattaatgcgaatcagcggttgattcaaatctgaatcggaaacgagttaacttcaccaacaggctttattcgaagaaactcccgccaaggcttgcttttctgaaagaaaatcagtatatttgaattataccaaaagcgagaacaattatggctaatccaaaattaccgggaatttccgaaagcgagcaagccttattgtatgccaaactgaatgaatacaaccgaggcagagcctcctttaaagaggcaggggtttatctggtggtgttgccccgaccgggaaagcccaactattccctttggctctactctcccctgcccgaaaagcaatcgattctctatatacacgatttatctccggatatcaacgagtccctgcggatagcaagcaccatgttttattattcgcgacggtgcctcatcctgatggattacaacgagaagagaatgcagagcaacggtgacgacctcatctttttcggcaaatacaggggacacttcctgcacgaaatcctcaaagtcgatcctgcctatctaagctggatcgcctataagtttactccgaagattcccaaacaggagcgtttcgtcaaaatagcgcaggcatatcattcggtacatctggacgtgatgctgcggaagagcaaagaggtacgccgaaaaagccgctatctaggagaagtgaacgagaagctgacggacttaaagttgaaagtcatgcgggtacgcctggaagacgatccgtataaaacaagagtatacggaacgactccgcaatttttcgtcaagcagatactgactctgaacgacgccagcggcaacctggtgacgatgagcatcccatcaaaaactcccagtacggtatcatgcactctatccggaatagagcatgaatatcgcccgggagaaattatatatgtagcatcggcgcgggtgtcacgcctgttcgaaagctacggttccaaatatacccgcctcagcaatgtgaagctggcaatagttaacgcttggtccagtcgtctttgacgaaacttgccggataggtcactttgtcgacaataccgtctttctgacgaatccaggaagtgaacgtgcgggcgccttcatcaagcacgatgatacgggcaccgttcggcaggtgattgtattctgtatttccgcctgtgaaacgaccgtaagccaacaggattcctttccacatcactgcataatcattgtcatgatcatgtcccacgaatattcccatcacatctccggactctttcatggcagcaaacatgcctgtattcagtttcggagcacaggcttcttccatgcgggttccgcgcaggatggcattttcgtcggaagctgcttcattgtattccggcacaggaatgtggaagaaagcaagtgccggcaatggcttcccgccgttctgtgctgtataggctgcgctctgctgacgataccagttgacctgatcgaacgtgagccatgcgtaacctttcacatccttcagcggggagtaagaatgagagtccatgcaatacaggacggctgcatccttcttcgcatcggaagaggctttcacggtcaagacataatccggagaaaggaccgagccacgatccggcatcagattgccgggtacctgacggatgatgtcatatagctgttcccgcgtcattccctgttcattatcatgattgccgaaagtgacaacaaacggcagcttacgcttcgatacctgttccagcacctgcaacatacctttatctgccggagcagaataaacgacatctccggtgaagattacaaaatcaggttgttcttcgtcgagtacctgattaatacgttccaatgcgatgtcggaagcgggattcttatacttgaaatggacgtcggtgaactgtacgattttaaatttaccgtctttgttgaactgcaattcgctcttttgggcgaagcagaaggcggtcatacacaaagagaccagtgctaagaataattttaaagttcgattcatactatttattgtttaagggggttagtaatctgctttgtcagtccttctctatcaacacggtagcataagcggaaatgccttcttcccgtccggtaaaaccgagtttctccgtcgtagttgccttgatagagatgtcttccgcatcgattcccatgacggctgccatcgtctcctgcatcaaagggatatgggctttcagtttgggacgctccgcgcaaatagtcgcatcgatattcccgacacggtatcctttggtcgcaatcagttccactgtctttttcaaaagaatcttgctgtcgatattcttgtactctccggcagtatccggaaaatgataaccgatatcgcgcatattggcggctcccaacaaggcatcgcaaaccgtatgcagcaatacgtcagcatccgaatgtcccaacaaccctttggaatgttccagacggataccgcccagccacaattcacgaccttcgaccaactgatgtacgtcgaagccaaaacctactcttattttcataagctatttaataaatgagtcaaataaagaatacacgggtcaacgtatgtagaagtcaagcagcttttctccttcaagatatccctgcaagtgctgaccgatactgaccggccctactccggcaggcgtgcccgtaaatagtaaatcgccaatcttcaaagtcacaaacttactgacgtaggcaatgatgtcatcaactttgaaaagcatatcggctgtacagccgcgctgcacttccttgccgtcaatcatcagattgaaattcagagactggatatctttgtagcggtctaccggaacaaaggtgccgatagcggcagaagagtcgaaacctttgcaaagttcccacggattgcccgcttcgcggaatttccgttgcaggtcacgggcggtaaagtcaatgcctaccgtcaatgcatcataataacgactggcaaaacggggagaaatattctttcccaaacggttgatgcgtactacaagctccgtctcataatgtacttcattcgaaaaatcggggataaagaacggtttgccatctttcagaatagccgaatcgggcttcatgaaaataaccggttctttatttacggatgtatgtcccagctcctgattgtgcagggcatagttcattcctacggcaataatcttcattatttgatttcattaaaattaaggcggttgaacatcaccgccagatgagcgtaaagggatgtattctgtaccacgatgtcctcaggtacacggatacggaacggggtaaagttccagactgccttgattcccccgtccaccatcatatctgtgatgcactgggcaatctcgataggaacggtcagcacgccaatctgcacgtcatattcttccatcttcttcagaaagtcgtccgaatggtagataggaatcccgttgaggttagtgccgaccaaagtcgggtctacatcaaaagcagccacaatctcaagcccgaaatgcttcagaccggagtcctgcaaaagtgcgcctcccagactgccgactccaaaaagaaaagccttatgtatctccgtaaaccccaggaagtgctctaaaacctcaatgagcgcatcgacctcgtaccctacacgtgtacgcccggagatattcacatacgacaagtcttttgctatctgtgaagcgtcaatatttatttccttagatatctgcgtagaagagacaaaacgttcgcctctttgcttcagcaacttgacattcgacaagtaccaaggcagtctgcgcaaagtaggctccggcactttcgtacaatctatctgctgtatcttttggttctcggccatttcttttatttattcaggttataagattgacaaaaatacgttttttttcggaattgcaagaatgattcatactatttctacacaggtgctattctcccgcaaacgttgacaacggaatgctgacggaaactcccgccgagcggtatttcaaactgtcgaagccaaggaagacgcctaaccgtgccagtttcatgaatccgatggagtaaccgatttccgaatagggacggcggtcgtattccacaagtgtacggagatgcagcgcttcatcgaggttcttctttttcagaaaaggaagaaatttcagcaacagacagggtgtgtaccaggaaatattagcttgtacccaacgggtattggtagagtatgcataattatccagcaaagagaatcctgtatcaaacgagcgttccgtcaccggcaaacctgtggtcgcaaaatgcttgaaatcggggaattgcataccgctcttattccagaatgttccggcattaacagcccagtctagtgtattaaacattccgaactctatgctctgcctggccgaaaactccgccaagtgataggacggagaaggcaaagcccctttcaacgggaaagcacggtcataacgcaatgtaaaggtagggcatttggattcttcatatactttctttcctctgtacatccggtaataatgagccggtgtatattccaaggcaaaggaagctttcaataattcattttccggcatcggatagaatgcccggctgtccggaatattcgactccgcttctttcttgaaccagctccggtgtatatgattctccagcatctgtcgtcgctgccaggaaagcgaggtagaaagcaacaaactattcgccagttcgatcttattttggaaagacaggaaacgcttctcatagagtttcacatcattccgcccgaagaaagaagaggcaacggtatttatcagacgggattctccactttctccattataatcggcagaaagaactccgccggacagttccagatatccccgtcgcctcggagcataactcaaggagagttcactttgccctgctaccgctttacgggcagtggtataataagcagaaggagtgaatcgcaaagtagatgcctccgatagcttcaaccctgtttcaaacttagctcccagccagaagccatccacaaaattatactcagacacataggaaggcaagcctttccagccaatccatgctttcttgtctgaagtacgataggttttgcccatcaggaaactctttcgactcttttctgacttccttcgacagctttagaattgcgggaatagtcttcatttttcccgtgcctttcagataggtgccggctctaaatcccttcacctgtgtccggtaataaggagcattcgcaatcgccttacgcattacggaataggccggatcttccacacctttcaccacattcacttcccgcagactatatatttgttcggagagcacaatattcttttccacatctccggcagatatggaaaaggagaatgtttgtccggcgaaacctaaagaagaaacctcacaggtatattgtcccgccgggagcgaggtctgaaaacagccgttatcatcggtagtgaagcctgttttaagttctttcagatagagtgccgcataggggatcggatttcctgcaagatcaactactctgcctttaaatgtttgtgcccaaagagaaatagtaaaagaacatatgagagcaaacgctatggattgtttcatcattttctgtttattagtcttatttcgttttattattagacgccaaagtaaacaaaagattgcaaagttccccacaaaatattacttttgacacaataaaagttgaagtatatgaaaaataatgattggaaagatagattgaacgtggtctactctacaaatcctgatttcaactatgacatggatgacgatcaggaacaagtgacgctggacaagagcaaacagaaccttcgggtttctctcgaccgaaaaaaccgtggcggcaaagtagttacactcatcaccggattcgttggaacagagaatgaccaaaaagaactcggaaaaatgctaaaaagtaaatgcggagtcggaggttcggccaaagacggagaaatcatcgtacagggagatttcaagcagaaagtgatagacctgttgataaaagaaggatatacaaagaccaaaggagtcggaggataatgaaaaagggcggaaaccatcaaagttccgcccttctctattatctttttgagataaattattcagctttcagagtgaagcgcttaaagtcaagaaccttcagttcaggatcagcagctgccaatacttctcttacagtcttcttagcgtccataatatcttcctgattcagcagacaaacttctttcaagaacttgcccagacgacccttagcgatgttctgaatcatttgttccggcagatgtgcagccttttcagcagaaacggtagcaataatttcctttgccttagctatatcttcagctgtaatccagcccttagccatattactttccatatgctcttcgctatctacatgagcagggttgatattagctttcttcaaagcagcttctacagctttctgtacctgttcagcttttgttttctcgatagcaacagcaatttccttttcctttacttcttcagaaacaccgtcttcatcaatagcaatcggattcatggcagcaatctgcatagctacttgcttagccaactgttcgtcaacgttcttgttaaaagcaacaatggtacaaagaccgtttctgttcatgtggttgtaaacagcagtgcttgcaccctctacagtcatgtaaccatcaagctccattttctcacctgtgataccgctacggtcaaccactgcatcctgtacagtaccgttacccatcggcaaagcttttacttcgtccaatgtcttgcatttgttagccacagcaagatcaagaatatcctgagtcagtttcacaaaatcagcattctgagccacaaagtcagtttcacacttcaaagcaatgacaacggcatagtcaccagtagtcttagccaaaacgcaaccttcagaagcatcacgttctgaacgcttagcagcaacagcttgtcctttcttacggataatttccattgccttgtcgtaatcgccttcagcttctgttaatgcgttcttgcaatccatcataccagctccggtcattttgcgtagcttggtaatatcagccatagttacagccataataatttcctttatttaaatgaataataattttcaaaacaaaaaatgtgccaatctgccaatacaatgcaggatgaggtaactaccacacgcctgcacgctagcaaattggcacatttatatatttaagcctcttcgtcttccttgatgaaggcagcagctttcgctgcgttgatagcttcttcatcagacttgtcgagtcttgcttttactgatttcttcttgcctttgtttgcaggagcttcaccagcagcttccatatcgatcttttcagcttttctttcttccaaaccttcgatcattgcagcacagcaagcatccaggataacttctaccgatttagtagcgtcatcgttagcaggaattacgaagtcaacgtttgtaggatcagagttagtatcaacgataccgaatacagggatacccagacggttagcttcacgaactgcgatattttctttcattacgtcgataacgaacaatgcagacggcagacgagtcaggtcagcgatagagcccaaagtcttgtccaattttgcacgttgacgagagatctgaagaacttctctcttagaaaggttagaatatgtaccatcgttagtcaatttatcgatagtagccatcttcttcacagccttacggatagtcgggaagttggtcaacataccacccggccagcgctcgattacataaggcatattaacagattgagctttctcagcaacaacctgctttgcttgttttttagtagcaacaaaaagaactttcttgcctgatttggcaatctgtttcaaagcttcagcagcttcgtctacttttgcaactgttttgtggagatcaatgatgtgaataccattgcgttccatgaaaatataaggagccattgcagggttccactttctcttaaggtgtccgaagtggcaaccggcttccaataaagtatcaaaatttgttcttgacatcttgttttttctttaaatcgtttactttcttttttgttttttctaaaccaaccgctgggtagtctatgagcagagtcccagtagtttagatactaaacatattcctcggtcaggcagcacattaacgcttgctgaactggaatcttctacgagctttcggctgtcccggtttcttacgctctacagaacgtgggtcacgagtcatgaagccttcagcacgaagtgcagccttatcttcagcgttcatcttaaccaatgcgcgagcgattgccaaacgcaatgcctgagactggccagtgaaaccaccaccacacaagtttactttgatgtcatacttctcagcagcacccagcttgttcaatggttgttttacaacatactgaagtatagttgatggaaagtactctgcaaggtctctcttgttaatagtaatctttcctgtaccttcgcttacgaatacacgtgcaattgcacgtttacgtctgcctaatgcatttactacttccattatatcttatttatatgaattaatatcaatcattttcgggctctgagcttcatgtttgtgttcgctaccagcgtatacatacaggttacccagcaatttagctcccaagatattcttaggaagcatacctttcactacttttttcagtaatctctcttcgccgttcggtttagtgatcaaacgggcaggagtcatttctctctgaccaccagggtagcctgtatatgacaaatatactctgtcattccatttgttaccagtcagttttactttgtctgcattgatgataataacgttatcaccgcagtctacgtgaggagtaaagtttggtttgtactttcctctcagcaattttgcaacttttgctcccagacgacctaaagtttggtctgtagcgtcaacgataacccattctttggttacggtcgctttgtttgcagaaatggtcttgtaacttaaagtatccactctaattttgttttttaaatgttactactaaaaattttcttcaccacatatcagccttccccggacaaaggaggactaacttgctatgaattaatctcttatcattttgtgataataatcggcttgcaaaagtacggcttttctttgaattggcaaactatttccagttttttttggatttatcgggttgtatgacaaggggaacttactatatttacaaataaggaacagaaaataaaaaggcctcctccggatttacaccggggaggtcaaaaaacaacaaagaatctatattgcaatctcatttatcgcacaatatcttccggaaacttagccggcatctccacccgtttccaggtctcataataccaggcattcagttcgtttccgttcagatcattcttgatgaagtatttcaaatgcaaataatcattatcctttatttcaaactccagaatattatcctgattatcgagcatcggaaggtggatattcttctcgatactctccttataagaatcatcggtcaactgtttatatgtaccatatcctgtgataatcgcatcagaaccgggaataatggtaaaattcacgattctgccgtcatcactcaataccttaaatgtattactgggtttcaacgatcccggaacatcgggagattctgatacataatggcacaactgccagatccctttcaaatcggccggtttgaatttggttttcttttgggccgtcgcacctgttaccgctaacaacatgattgaaagcatggtaaagaaatagagttttttcatgacaatatgattttagttaacactcttgaatgcgcatgtccaaatataaagatttattttgagaaagtaacaatcaaatgcataaaaaaactcgcacaatcaaaagattatgcgagttttacataaatataccgaaatattagaaatcagcatttctcggtgtacgcgggaacggtatcacgtcacggatatttgacatacctgttacaaacagcaacagacgttcaaaaccgagtccgaaaccggagtgaggacaagtaccgaacttacgggtatccagataccaccacatatccttcatcgggatatgcatttcttcaatacgagtcatcaacttgttataatccgcttcacgttcagaaccaccaatgatctcaccgatcttcgggaaaagaacgtccattgcacgtactgtcttcccatcctcgttctgcttcatatagaaggctttgatttccttcggataatcagtcagaatcaccggacgtttgaagtgttcttccaccagataacgttcgtgctcggaagccaagtctaccccccagtaaacagggaattcgaacttgtgacctttcgcaacggcatcttccagaatcttgataccatccgtataaggcaaacgaacgaaatcatccttcaatacaccttgcagacgttcaatcaagcccttatcgaacatatcgttcaggaacttcacatcatccgcacagttatccaacgcccatttcacacaatatttgataaactcttctgccaggtccatattatcggcaatgtcgttgaacgcaacttccggctcaatcatccagaactctgccaaatggcggggagtattggagttttcggcacggaaagtaggaccgaatgtgtagatagcgcccaaagcagtggcagccaattcaccttccaactgaccggatactgtcaaacttgcctgcttgccgaagaagtcgtcatcataagagatagaacctctttcgtctttcttcaagtcatacagattcatggtagttacctgaaacatctgtccggcaccttcacagtcggaacctgtaataatcggtgtatggaaatagaaaaatcccttttcatggaaaaacttgtgaatagcaatcgccatgttgtgacgaatgcggaacactgcaccaaaggtattggtacgcggacgcaagtgagcgatctcgcgcaagaattccatggagtgaccttttttctgcaatggatatgtattgtcgcaagtacccagcacttcgatttctttagcctgcacttccaccttctgaccggaacccacagattccaccattactccgttcacgctaatacaagccccggtagtaatcagtttcagcatctcttcatcgaaattagccagatctactacgatctgcacattatttattgtagaaccgtcattcagtgcgataaagttaacttgtttgctacctctgcgggtgcgaacccatcctttcacattgaccatagcgccaatatcttcgcgcttcaacagatcaacaatttttgttctaccaatcttttccataaaacttttttaatacaatattatatattactcaaacgaccccatgcggaggtagtttacttctgcttccgacaggtaacgccagtctccgcggcgcagaccttttttggtcagtccggcaaagaatacacggtcgagttttactactttatatcccagtgattcgaaaatacggcgaacgatacggttcttgccggagtgaatctcgatacctacctggtctttcttgaaatcatctgtgtagctgatagcatctgcatggatttcaccgtcttccaactgtacgccggctgcaatctgatccatatctgcttttgtcaggttcttgtccagatgaacatgatatattttctttttcaagaatttcgggtgtgtcagcttggaagccaggtcaccgtcatttgtcaacagaagtacaccagtcgtgttgcggtcaagacgccctaccggataaatgcgttcgttgcaagcgccttttaccagatccattaccgtgcggcgttcctgcggatcatccgatgtagtaaccgtatctttcggcttattcaacagtacgtataccttacgttcgatgcttaccggttcatcgtggaacttcaccacatccgagcgtttgatctttgtacccaattcagttactacttcaccgtttacagaaaccacacctgctgtgataaactcatcagcttcgcgacgtgagcaaacaccggcattagccaagaacttattcagacgaatcggttcgttcggatcaacaaactgttccttgtactcaatctgcttcttgatgctatacttagcattcggatcgtaatcactggtacgcggacgcggacgatagccaccctgcgaacggtcattgttaaatctcggacgatagccaccaccgttgttattacggtagccaccaccttcaccactgttgaagcggggacgatatggacgatcaccaccttcgcggttataaggacgctgaggacggtcgccaccttcgccactgttaaaacggggacggtacggacggtcgccataagagcgttgctcgccaccttcacgattgtaaggacgctgcggacgatcgccaccttcgccgttcggattaaatctcggacgatacggacggtctccaccttcacggttgtaagaagggcgttgaggacgatcataagaacgttgttcaccaccttcgcggttgtaaggacgttgcggacgttcgcctccttcattgttgctattgaagcgaggacgatacggacggtctccaccttcacgattgtaagaaggacgttgggggcgatcataagaacgttcaccataagaacgctgtgggcgctctccaccttcactattcggattaaatcgcgggcgatacggacgatccccaccttcacggttgtaagaaggacgatacggacgttctccaccttctctgttgtaagacttgttaccatcacggccggcacctgtattctcctcattgtaagaattttcgcgccattcttcgttttctgtgctcatttttttattcgaataaaattagactttggcctcacggcctattaaaaaaacacgtttattgtataagtaaacaattaaagtcccgtatatgtatgcggagtaattgctcttaactcttttttaatatcttcgcttacgttcaagccttcgataaactctttaatagaactttctgtaatagcctggttggtccgggtcaaagctttcaatgcttcatacggacgcgggtaagcctcgcggcgtaaaatcgtctggattgcctcagccactacgctccagcagttgtccaaatcacggtaaatagccggttcgttcagcaacagtttgcgaagtcctttcagtgaactctgaatagcaatcacgatatgaccgaaaggcacgcctacattacggagcaccgtagagtctgtcaggtcacgctgcaaacgggaaacaggcagtttcacagccaggtgttccagaatagaagttgcgatacccaaattaccttccgcattttcaaagtcgatcggattcactttatgcggcatcgcgcttgatcctacctcaccggctttgatcttctgcttgaagtattccatagaaatatactgccagaagtcacggttcatatccaccattatggtgttgatacgtttcatcgcgtcaaagacagcagacaagttatcgtagttcgaaatctgagtggtatattcttcgcgctccagtcccagtttctctgcaacaaaccgattaccgaattgtttccagtcatattgaggatatgctacatgatgagcattgtaatttccggtagcgccaccgaattttgcagtgatcggacatgctttcagcatagccagctgacgttccaggcggtaaacgaataccatcacttccttacccaaacgagtcggagaagccggttgcccatgagttttggcaagcatcgggatttcagcccattctgttgcatacgttttcagttgtgcaatcagttcttcgatcagcggataatagactttatccaaagcttccttgatagaaagaggcacagacgtattattaatgtcttgagaagtcaatccgaagtgaatgaattctttatagtcatccattccacccagcttatcgaattcttctttcaggaaatattctacggcttttacatcatggttggttacactttcgatatctttaatgcgttgcgcatctgcttccgagaagttacggtagatattccgtaaagtttcaaacacgctgctatcgattcctttcaactgcggcaaaggaagttcgcacaaggtgataaagtattccacctctacctgtacacggtatttaatcagtgcaaattcagagaaataagctgccaaagctttagttttgcctctatatcgaccatcaatcggagatatggccgttaatacatcaagttccatacgttttcttagataattatcagactgcaaaattaactctttttcctgagttataaggcaaaaggataaagaaagtttgtataaaagcggtaagaaataaaaaaagtctcacgaatttcttcgtaagacttctatttcgtgggcgctgagggattcgaacccccgaccctctgggtgtaaaccagatgctctgaaccagctgagctaagcgcccttttgttgacggaagtgtttcggtattctttgtgggcgctgagggattcgaacccccgaccctctgggtgtaaaccagatgctctgaaccagctgagctaagcgcccgtacacttccgtttcaaaagcgatgcaaaggtacggctttttttgaaacctccaaacattttgcatattatttttcaagaaactttttatcaaaaataaaaaccaactgattatcagcaaataatgaaaaaagtttttttcatgcaactttcccttctccaagcctgtccactaaacagaacaagataaagccaacaatgtgggaacactcaaatccgggaaataagattcccggtcaagcctgcttacggataaggcgcgccggattcccgactgcaacactgtcgtcaggaatatctttcgtcacgacgcttcccgctcctatcacacaacggttgccaatcgtcacaccgggacaaatgacagcaccgccgccaatccagcaatcctcgccgatcgtaaccggataagcatactctttcgaaccgcgacgctccagataattcatcggatgatgcggtgtataaatctgtacgcaaggaccgactagcgtatgggcaccgattgtgatataccctccgtccagaaaagtacagttggcattgacaaacacgtgttcgcccaactttatcccgtctccgtgatcgcaatggaaaggaggacagatcaccgaagtttcaggaatacccggcaccagttcttccaacaattctctgtacccgtcatcgtacgtgctcaacccgcgcatgatcgccagcaacttcttggcatgctcaaaacgcacctgcaactccggcgcggacatatcagccaactggctgctacgcatcttctctacttctgtcatattccttattctcccatcccattaataaataccaatttcctttcatccgaaagcgattcgtcaaactcgaacccttcccacgagaatcctttcagttcctccggatttccgatcttatttttcaatatgaaacgtgtcatctcgccacgggacatcttggtatacaccactatcgtagccagctttccattcttccagacatgaaattcgggagcgaccacacggacttcgctctccacccgcttccagtcaaacaggcttttcatctcgtcactggcaagattacacaagattcctcctgccgatcggatgtcctctatgaacgtatccgtcagacgcgaccgccaataagaaaacaaagtctgattccccaattccggcaatacgacatccccctccagccgataagcacgaatcacgtccaaaggacgcaacagaccgtaacagaaagaagtcagccgcaaatgttcctgcgcatacccgaaatcttctgcagagaagtccttcggattcagccgtttgaatacaatgccggtatacgccagcaaagcaggcaattccggagtggtttccgcatgaaaagcctgataacgtttataattctccacagcaatctttgcgtttacacgcagcagacgttctaattcgtctacagaaaactgggacatctgcaacgctatttccgccgcttccttctgaaaacgggggatcgtagtcaaagggactttcaccttcgacaccgcactcatcgtcttggcacaagatagaagtactaacattctgaatcgggtttaatcattttgaaaaacacaaaaataaaaaataaatagcttcacttgttgacagatatccaaattatgcctactttcagccaataattaactataatcatttattaattaacaaaaacacaaaaatcccccttatgagaaacaagtttgtatctttgaaagttctggccttattggtcatcttttgtctgacgggtagcttaacccgtgccgctgtcaacccgaaaccgtttgttgtccccgaactcaaacaatggacgggaaaagacggtaacttcaccccgggaaaagacgcccgaatcgtctgcacttcccaaaatcccgaattactgagaatagcccggatgtttgccgacgattatcaacagatgttcgggcagacattaagcgtagcacaaggcaaagccacgcccggcgatttcgtcctatccttgtcggcagacaagaagctcggtgaggaaggttacgccatcaagataaccgaccgtgtagccatctccgctcccaccccgaccggtctttactggagcacacgcacactcctgcaactggcggaacaaaatcaggaacgctcactcccgcaaggaacgattcgtgattatcccgattatccgcttcgcggtttcatgatagactgtggccgtaagttcattccgatggcttatctgcaggacttggtgaaaatcatggcttactacaaaatgaacaccctgcaagtccatctgaacgataatggattcaagcaatacttcgaacacaactgggacaagacttacgctgccttccggctggaatcagagacttatccgggattgacagcccgtgacggctcgtactccaagaaagaatttatcgacttccagaaacaggcggtatccaacttcgtggaaatcattccggaaattgacgttcccgcccactcactggctctcacccattacaaaccggaaatcggaagcaaggagtacggcatggatcacctcgacttattcaagccggaaacttacgaattcgtagatgctctgttcaaagaatatctggagggcgacaatccggtattcgtaggcaagcgtgtacatatcggtacagacgaatactcgaacgcgaagaaagacgtggtagaaaaattccgtgctttcaccgaccattacatccgttttgtggaaggtttcggcaagcaagcagttgtatggggcgcgctcagccatgccaaaggcgatacgcccgtcaaatcagaaaatgtcgtcatgaatgcttggtacaacggatacgccgatccggcaaccatgatcaaagacggatatcaactgatcagtattccggacggactggtatatatcgttccgaaagccggctactattatgattacctcaacgaaccatacttatataaggagtggacacccgcccatatcggcaaagctgtattcgacgaaaaacatccttccattcttggcggtatgtttgccatctggaacgaccatgtcggcaacggtatctcggtgaaagacatccatcaccgtatattctcgcccctgcaaacactctctgtaaagatgtggacaggcgctcaaacaggcattccttatgaaacattcaatgaaaaacgtgccctcctcagcgaagcgcccggagtcaaccaactggcaagaatcggcaaaaagccggaattggtatacgaacgttccacagtcgctcccggcagcacttccgattatccggaaattggctataattacactgtcagtttcgacattaccggagcaaaagaaagtgaaggaaccgaattgttccgttcgcctaacgccgtattctatctgtcagaccctattcgggggatgatgggatttgcacgcgacggctatctgaataccttcccctacaaagtgaatccaggagaaaaagcaacaattcagatagaaggaaacaattgcagtacaacgctgagagtcaacggtaaagtggttgatgaaatgaatacgcagaaactttactttaatgcgggaaaagattcaatgaactatgtacgtacactagttttcccgctggagaaagcaggaaactttaatagtaaggtacagaatctgaaagtatacaattattgcgtaagcaaaccataagatttagatacggattacacagatttcacatttttttagcggtacaatctaccaaaaaccgtatcaatctgtgtaatccgcttctggaagaagcacaatcattcatttcatttacgtacggatttgagcaaaatgatagtaatagtatcttaaaatgggggtgcccccaatggagatactactgtttcattcatttttgaaccgttacgaatcaatttaaacctgtataaccaaaagctacacaaacgtttcttccctaagcaataaaacgcttttttattgtcacttatcacttttcgaagttaactaactgattataaacatatcatcggtgataataagcggtgataatacggtgacaatagctacatccatacattttattgtcacttccctcccaatctcactgttcatctcacctactgctatctccccatcaagcctacttcatccgagtcctgatcctacgcaacaaataccgtatactaccggtatctttctcttatagtgcctttattgttccattaagacaccgatctctttagttgttcacggccgtggcaagtattgttcacggtcgtgacaagagttgatcacagccatgagcagacctgttcacggccgtgaagagctaaagagaacggcactctattcctactttccttataggaaaaagcaagtatataaggagctgaagagaacattagcactatcttacgactcattacaccgcagacaacaaacaaaaagaagagtcatatctacaaaagaagagactccctctttggtatgccaaagagagagtctcttcaatatatatacagctaaagcagtttatttatattcctgccagctcttaatctgaatatcactcagtttcagttcacagaatgcttcgatgaaagcacttgccagacgggcattggtgatcaacggaatgttatggtcgatagcaccacgacggatacggtaaccattcgtcaactcacgtttgctgtggttcttcggaatgttgacgatcaagtcgaacttatggtcagcgatcatcttcatcacgttgttttcagcacccggtttttcatccggccagtaaaccggagtcgtttctacaccgtgagcgttcaggaatgcagccgttccggcagtagcataaatctgatatcccttggcaaacaacatacggctcgcatccagcaaatctactttagacttcatagcaccggaagagaacatcaccgccttttccggaatcttgaatcctgtagcgatcattgcgttcagcaatgcttcagagaaatcgtcgccgatacaacctacttcaccggtagaagacatatccacgcccaaaacagggtcagccttgtgaagacgggagaaagagaactgagaagctttcacaccgatccaatcgatgtcgaacgcagtcttgtccggctggctgtacggagcatccagcatgatgcgggtagctgtttcgataaagttgcgtttcagcaccttagatacgaacgggaagctacgggaagcacgcaggttacattcaattaccttcacctcgttgttgcgggcaaggaactggatgttgaacggaccggagatattcagttctttagcaatctgacggctgatcttcttgatgcggcgggcagttgcaaagtaaatcttctgtgctgggaataccagtgtagcgtcaccggagtgtacaccggcaaattctacgtgctcggaaatagcgtattcaaccacttcaccgttctgagctaccgcgtcgaactcaatttcctttgtattttcgaggaactgagaaacaactaccggatattctttagatacttcggcagccatcttcaggaagttttccagttcttcgtcatcgtagcaaacgttcatagccgcacccgagagtacgtaagaaggacgaaccaataccggataacctactttttctacaaatcccttcacttcttcaaggctggtcagttccatccaagccggctggtcgatgccaagctggtcgagcattgccgagaacttgttacggttttcggcacggtcgatggaaaccggagaagtacccagtacaggaactgactggcgatacaacttcatagccagattgttcggaatctgtccgcctacggatacgatcacaccgcgcggttgttcaaggtcgatcacgtcaagtacacgttcgaaagagagttcgtcgaagtacagacggtcgcacatatcgtagtcagtagaaaccgtttcggggttgtagttgatcatgatagacttgtaacccagtttgcgggcagtctgaactgcgttcaccgagcaccagtcaaattcaaccgagctaccgatacggtaagcgcccgaacccagtacgactactgatttctcattcttataatagtttacatcgtaaccttctaccgcataagtcatatacaggtagttagtcagttccggatgttcggaagcaacagtattgatacgttttactgccggaaggatgcccagggctttacggtgagcgcgtactgccagattttccttttccatgttgccggtcgggttcagtacgaagcgggcaatctggaagtcagagaaaccaaggattttagcttcgcgcatcacgtcagccggaatatcttccaccttattatatgtagacagttttgccttgtagtcaacaatgttcttcagcttgccgaggaaccaaggatcgatcttagtcagttcgtggatgcggtcgatggaatatccctcttccatagcttgtgcgatggagaagatacgcaagtctgtcggacgtgaaagttctttgtcgaggtcgtcgaagtgtacatcatcattaccgacaaaaccgtgcatgccttgtccgatcatacgaagacctttctggatgatttcttcgaaagagcggccgatagacatgatttcacctaccgacttcatgcttgaaccgatttcgcgggatacaccggcgaatttcgtcaagtcccaacgagggattttacagatatagtagtccagttgcggagcaagatatgcagagttcggagtgcccatttcaccgatctggtcgagtgagtaacccaatgcgatcttggcggcaacgaatgccagcggataaccggtagccttggatgccagcgcggaagaacggctcagacgagcatttacttcgatcacacggtagtcgtccgtatctgagttgaacgcatactggatgttacattcacctacgatgccgaggtgacggatacatttcgtagacagttcctgcaacagtttcagttctttgtcgtccaatgagcaggtcggagctactacgatagattcaccggtgtggatacccagcgggtcgaagttttccatgctggctacagtgaagcagtggtcgttcgcgtcgcggatcacttcgaactcgatttctttccagcctttcagagattcttctaccaggatctgtttggagaaggcgaaagagctttcggccagtttcaggaattcttcttcgttagcgcagataccgctacccagacctcccaacgcgtaagccgaacgtaccatcaccggataaccgatcttgcgggcagcagcaatggcatcctccatgctttctaccgcctgacttaccggagtcttcatattgatttcatccagtttcttcacgaacaggtcacggtcttccgtgtacatgatagcttctaccgatgtaccgagtactttcactccatatttatcaagaataccttgtgtgtacagttcggcgccgcagttcaatgcagtctgtccgccaaatgccagcaggatgccgtcgggacgttctttcttgataatctcttctacgaaataagtagttacgggaaggaaatacactttatcggcaattccttcagaagtctgaatggttgcgatgttcgggtttaccaatactgagctgataccttcttctttcaaagctttcagtgcttgtgagcctgagtagtcaaattctccggcttgtccgattttgagtgctccagaacccaaaacgagaactttcttgatttccttttccatttcttttgttgttatagtaagttgttatttctaagttttgccaataaaaaaaatgcgttaccctcgtaaaaggattaacgcattaccaaagaactaaaatatcgtttttggagaaaaaagaagaaggttgttgattccgggtggaaaacatccgaatgtagataatacttacttcttatttcttgttgattcattgtcgatttcaaaatttgtgcaaagtaacgacatatttctaaaactacaaagaatttgaagaagaatattctcttttatttgctttgttactgtgaaaacaggcaccgtccccctgccatctgataccaaaagccagcaatagtaagcattagtaacgaagtagctccattttgacgcatctttcattttttatccttatctttgtcgctaaatctattataataaggtaacaacaatgggaaaagaaaaaatcatactcaccggtgaccgccctaccgggagacttcatatcggacactatgtaggttcattgaagcgcagagttgacctgcaggatgcaggtgattatagtaagatgtttatctttattgccgattcacaagcgttgacggacaatatagataatccggagaaggtacgtcaaaatgtaattgaggttgctcttgactatctggcatgtggaatagacccgtccaaggctaccatcttcatccagtcacagattccggaactttgcgaactcagtttctactatatggacctcgtaagcgtatcccgcttacaacgtaacccgactgtgaaatcagaaatacagatgcgtaactttgaggcaagcatccctgtaggattcttcacttatcctatcagtcaggctgcggacattactgccttccgggcaaccaccgtccccgtcggtgaagaccaggaaccgatgctcgaacaggctcgtgaaatcgtccgccgtttcaactatatctatggcgaaacgctggtagaaccggaaattctgttaccggacaacgctgcctgcctgcgtctgccgggaacagacggcaaggccaagatgagtaaatcactcggcaactgtatctacctgtcggaagaaccggaagaaattcagaagaaaatcatgagtatgtataccgatccgggacacctccgcgtacaggatccgggcaagattgaaggtaataccgtatttacatacctggatgctttctgccgtccggaacacttcgaacgctatctgccggattatccgaatctggatgaactgaaagcgcattatcaacgcggtggactgggtgatgtgaaggtaaaacgcttcctgaacgctatcatgcaggaaacactggaaccgatccgcaatcgtcgtaaagagttcagcaaggatattcctgccgtttacgagatgctacaaaaaggatgcgaagtagccagagctgccgctgccgaaacattggcggatgtgaagaaggctatgaagatcaactatttcgatgacaaagaactgattgaagaacaggtgaaacgcttcgcggcttcacaggaataaagataataaagacgaatataataaagtaaaggctgccgtccactttcgaacaggcagcctttactttattatatagtctgctcaatcagtttcatcttcatcatttttaaagagtacgtcttttagtttctgataaaggaatgagaggatcagcaggatcaatcctaaaatgataaatacaatgatcttaccgattgttggcattgcccataagtctttcagaaccagcttcaacaggacgattccaaaagttgaaagactgatgattcgcagtactttctgatgcagacgcatacccagtgccatttgaataaatcctgcgatactcagtgaaacggagaagccggcatcgaaatcttctactcctgcttgcaggaggaaagaacgtgccatcgtcagccaaaggaagagcgccaggacattcagataaacggtgaaaggagttttcaatcctattaatgtatagtattgacgggcaacgtagtacagattagctataacaaacgctgccgcaaaccatcggagcaaagcaggagtcaggctcgtgtatacccactggtctccccatatattgatcgcatagatcagcacgttcattcccatagctgtcagataagggattgtgtattgttttatcgggaagcgctttttgaaagcatagctgagaataaagatggcagcagaagtaaacgccagcatcattccgcttcttgtagctcctgccaagtgcaaggcaaactctgccataaatgtataatagaggatggcggcagcagcaagaagcatgatcgaattccagggagtgtatctcagataacgggcttcggtaaagagagaacggtaacgccccatcagtaaagcgaatgctccggtggccagaccgacaaacagggaagtagcaaaagaactgttcaggaaaatggtttcggaggaggaagaggtcatcagtacattatatatatccatcagatatgaaacaagggtcagtcctatcaatacctgtgttgcacgttcgtatactccaatcttcgattttacgtaaagccataacagcagcaccatttccgctgcccagaacagcgtgatataatttccatccaactgaataggtatagtgatggagacaaatgtcagtaccagtcccaacatcgcataaatgaggaacttataatctttcttgctcatccgtagccagatgactaaaactaaattgatgatagcgatcaataaactcagtaatccttccgatttaaacggcagtcccatattacgcaggaacaggattcctaataacagataaatgaaattgttggttatgatgaccagcagcaatcccctgttctttttcacggcttctatccggagtatcgataatatcggcaggaggaagatgaaataaaacagcgtcgcaaagatgaagagatggacggaaatatgtgtcgatcctgtagtaaagcctgtcaacaggaagattcccattaccacataagtaaaaacaaatgcaatcaccggaagttctccccatttcatatagatggacagtccgaacattccaagattcaagatactcatataagtgaacagtaccaagtagttaccattcccggtgctaacaaggaaaggtgccagaaatcccccgacaagtgagatgatagccagttcgcgcctgtcatacagaatggacaggatagacatgaacagcgttgtagctatcagaataataaaggcgaccgtctgagggaaaaggtgataaaaatgaaaggcaatggcgaccgtgagatagaaaacggcaaaggcgccacccgcaagcaaggagctgaatgtgcggtacttcttttgcaggcgttcggcaaccaccagcaatgcggagccggtcaggaaaccaagtacggtacgcaatgtttcgttaatccagtctttatcaatggcatattttacaaagaagccgactccgatgacgaatacaagaataccaatcttaccgaaaagattttcaccgataaacttttcataattaacctgcttccgtttggaaacagacggtatttcgagaggagcctctggagaagtttcctgcaaagtggcctcagcagattctttttcaagggaagcatttaatttctgcggtgtagtttccgccataatgggctgtatgccttcaacagctttttcttcgacagctttctcttccttcaaggctgtcactgtcgaatcgggcaattcttctgttacataaggcagtatatccgtattgtccaaagtctctgccgttacatcctctttggcccttacagggccggaagccattttctcctgagctttgagcaggtcgtccattcgtttctttatctcgccaagctctttgtctaccttgccgaaccggctttcaaacttttgcagcagaacaaaaaacaacactgcagcaagcaatgcacatgtgccataaagttcacccataatgttctatatttgagttatgtatcacaaatatagaacattttaattacaaatgggcaaaaccgacaagatatagcatattattgaacatcttccgaagcagatcttgctttccggaattcatctacccaataggcagttcttatcaaatagtaatcatcagccaatggtttataatccaaatattcaaaagcatcgcacttctttgagacagccggctctatctgagttccttcatgccattcattgaaagacgtaatcgaaatataagaagcaccgctttctatggcagctttatacatatcatcgtaatattttccattctcacggtctcgggtggtacttccgttccaaggacgaatccgggtatcaatatatcccggaccgacactcggaataaacaatttattatgtgcctttgcccattgctgcatggatttccagttggccggagtagaagcatttgtgaaacctgttgcggcaaagtaagtgtaaaagccatccatgcacgctgtctcaatgtcgggcaactcgctttccttcaatgtcagaccaataaaaagaccgtcgtacttggtattacgcacacttatctctcccccggcagcaaacaacttcgcccactcggcaggtttgatcagataagaatcatagataaagaaaagaggtttgccgtgcgtacggtaaaaagccggatgatcaccataagtatccactatatattgaatattctcccttaccgtttgcgggctgcgtccattaaaaggctctatatgaaagcacacctttgcccctacttttgcagcctcatccagcaggagagacacactttggttgccataatcgctttctccccaccaagtgacagacagtacaccgacattcgcttttatatgcatccggatatgtttccgaatgatttcaggatcattgctgctgtacgttccgagctccggataaaaattacaggcgatgtcatcattaagtccggatatggcaccgacatctcccgaatgtcccggagcaagggctatcgggtgcatccagtgcttcatttctccatccactgacggatttccataccaattataataaaaactgatcgtatggtcatccaacgtaatgtttgccgcatccaaatcgtgttcaccgttcattttctttttgttaccgttacagccggcacacagaaataatgccaataaaacaaaaacaagttctttcctcatgttcgtttgtttaagaaagtagtcccaaagccagctatccgacggccttgggaactacccggttcgtaaaacaattatctattctctacccattgaaaatctccgatcagcctggctgagaatttgcccgtcagatctttgatgttattgttatccgaaacagtcttattcaatgtccatccgcataccagatccgattcgcttccagtcacggattccggagtatccatcagatgttgtatttcggcctgtgtcttcgccgatttccagatatgcagatgacgcatacatccattggtgctcttttctccgatacggttggcagttgcgctaagcccggtaaaggcaaccatagccacttccttatcattcggagtatatggcaaacggtcatcccggcctctttccgacaacatcaactgaccgttgacgtaaatcttggtcatcaccggaattccgtctctgacttctccgtccactccgttctcgttagtgacaactgccacatgaacccactgatttagtgtgctgaatgagaagcccggttcaaacaagtcactatagcctataccatacgtcatacgtaatctgccgaagtgactgtttaccgcccatcctttacgctcgtgatctttcgtatcatcatccgtgaaggtggaaagcaagaatacaaagctattgagatattcgtccacatctgtcagcttcacccagaactcgactgtgaatgcttgttgcccctgctcgccaaaagctgaatactccggatgaacaccaaaatcaatgtatccgccattctttccgttgaccaacagttcagcggcaaccggtaaaaagtcttcggtacgtctggtcgctctgaagttcttctctatctggttagcttcacggataatgcggtcggcttcactgtcagccaactttttgtttccttctttcagtttagcgatcgtttcctccagataaacaatttcatcatccagcatggctttactggataccggatagttatctttcagttcgccatatgtagctccatcccgcagcgcagtcaggttagtcaccaatgtactgaagcgctctatgaagatttcggtcttgtccgtttccgtcggccagccgctattgtcatcatcatcagaacaagaagtaaatgccagcatctgaagcatcataaacactatcactacccaattatataaatagttatttttcatatctatcctgtattttctgtttcgtatcattctaattcaatccacctatagtctccgaccagctttgccgtatactttccggtcaagtctttaatttcctggtcgtcaagcgccatcttcgcgaaagtccatccgcaaaccaaatcgtcctcttcgcccgtcacattctccggatgctccatcaaccggcggatttcatcctgagtcttggcggtacgccagatatgcagatgtttcatacttccgttagcacctttatcaccgatacggttgcctgtagcactcatgccgccaaatgccaccatcgggacattgctgtcgttagaagcatacggtttggaagcatcctgatgagaggtggtcgaaagtttcagttcaccgttcatatacattttggtcatgacaggtctgcctccattcatctcgccgtctactccggtttcatccgtcaccacagccaagtgtacccactcattaacggtggcaaatccgaaggcaggttccatcaggtcattaaagcccattccgtatgtcatacgcatgttgttgccaccatagttgtagctattcacgcaccagcctttgcgttcgtgattgttcgtatcatcatccgtaaaggtagagatcagatagaagaagccttctacatccttcagctttacccaaaactcaacagtaaatgcctgcttgccaacttcaccgaatgtggaatactccggatgagcgccaaagtcaatatatccgccattctttccgcttacttccagctctgccggaaccagtaagtcttccgtccggacagtcgccttaaactcggctatcttttcgtccgattctttcagcagtctggctgtctcttcgggaatccgagcttccgccactcccgcttcttttatcgtctgaaggaaatctttcagcttggctatcgcatcttccagaatcgcccggcttgtttcaggatacattccttcccgaagcccgaactgggattcagcctgcaggtcggtcaacacttttatcttcttgcctatctgttcacgatactcatataccttcactccttctccgtcatcatccgaacatgagtagcagatacccatagcgaaagccgaaagaaagactataaccagtaaccggatactatatctatttttcatatctcatttgttttagattcgtttataattcctttaataaataccgccttcttctatgtacttcctgatagaagcggccaaatccatcgggagcataaattcatacgtatccggacaatcctgttcaacccgttcgagttccttgatcagtctctcgtacactaccactttatttccttcaaatccgtaatagttggtcaacagatagacatgccggaataaaggacgccgcgggctgggagatacagacatcagatcacggtatacgtctccattattgcggcacatagtcccctgatcaatacgcaccacgccatctaccaatttgtaagatgagcctgtggtatgtgtccggttagatccgtccataatcgcatcgacagccttgctcttcatgtattgttcgaaatacatctgctcgtctgtattccagagatgcgccgtgtggaaaccggcagtggataaccacttcttgttcatttccaaccattccgcatatttaccgctctgcgcataataatcaccatagataaactggaaaccggaaggccctgccgtcaattcatcgttcggagtcatattcttatagtaaaattcaagtagcttcggattcaattcctgcaagcctgccgccaaagtcactcctaccggaacttcgcctctgcgctttccttccttgaatatctgataaagagaatttgcatcgaactgaatattgtctccgtcactcagactgatagcgacatatatcttacccggcttcacttctccggctatccctttacgctgctggaaggctttgctcgggaaactgcaccaataactgccattcgcataatagtcactcactacaaatcctgcattatggatgttggtaatcttattcagttcgtcgccattggcattcattccataaccaaataccgaagaacccaccggataagatccgctattgaagatattatccatgatctgtttgtcatctccattagagtcgtccaaccagaagacaaagcctttagaagcagctacgtaatcgtacattctccacggattatctttataatcactccgcaatccaccggagaaagttagcttcggatggcatttgtcggcatagtgcgctatcgcccagccataagcttctgcctttgatgaccattggttacgtatatccctaacttccagatttcctattcccagctcatcctctataaactttctcatggattccgtaaccggaatgcctttctcctgtgacgaaatcatctgtgccatactccatgaccaaggctgattctcatcccagactaccaggcagttgaagcggtctttatacatattatataatgccgcaaagcctctgttgcgggaagtattcgccaaaggctgcatctcatactgcacttcggcatcatccagctgcgtcaaatcctgctgtaaccagatcagataagtcagtgcctgttcctggttaatcactccctgcatgacagcagtggtcagcttcgatatattttcgtcatcacgaatatcgaatacattcactttcgccaccggctgattcttaaagaacataccactttgaggagtcgcatcactatgataatccatcaaaggatgcagcttttgcgcccagttcttcaccagacgggcagtcactccggcagacatctctccggtcgttctgacaactttcatttcatatcggtaagacaacaggctattgtccgtaatcgcaaattccgcgctctgcactcctttggcaaccgtctgttgctcattagtctgcaaatcctttacctgcacctccttgatatccgtaatataaggatcaatccaggtgaccactgcttttccattgatctcctccacacggggagtacggacttcatttcctctttcggccgttgttccaaattcatcgtcatcctcgctgcaaccgaacattgaaaaggaaaagataaataaaaacgaccatagactggtgagtacaatcatctttttcattgtgttatattttagattttaatattattattctgactttattccggcaaactctctgaagagggcggcacggcatccgaagctatcccccacttcttattgggcttatctcccatctgcaaaaccagacgtccgccgttttgaatatccgcatggctgaaccacggcttattccacggcgttccattcaaggtagccgactggatgtacttatggtccggcgcataattctccgctatgatctcaaaataatgtccgtcacctacctccatctttgcggattggaataccggactgccgatattataagttggagaaccgggagttaccggataaaagcccatcatggagaataccacaaatgcagtcattccacctccgtcttcatcaccgggaacgcccatcaagtcattacggaaccactggttcagcaaaacgcgaatccttttttgtgtcatccacggctgaccggcatagttatacaaataaggaatatgcagacaaggttcatttgccatagagaactggccgacattaccggtatggtccggcaactgatgatagaaatcaaacttgctccgccccaacggttcattgaatgtctgattcaatctctcgataaatgaagcctgtccacccatcaaggcaatcaaatccgccggattgtgctgcacatcccaacgatagatccaaccgttgttttcaccataatagccacgtgccccctgtcctcccgaatatcgatagtcaaacggttcgataaactttccgtccttgttcttgggatgaaagaaacccgtttccgcattataaacattccggtacgtataagacatcctcataaacttcttatagtcatcggtcttgtttaatgttctggctatctgtgccagacaccaattatcgtaacagttacccaacataaccgcaaccgcttgtcgtctctcgaacgaatgaacagccttgcaagtttcttcttcgccagggttcagtgcagggaaaaatcctttttcctgatagaacttatcgagctccgtcaacggacatctcagccagggcaacaacgttttttctgtaatcgctcctttgcaggcttcataagcagcctccagatcaaagtctttcaatcctttgcaataagcatcccagataactgccactgcatgattgccattcatccggtgactgtctccggtcacctcggggaaggtaggcatccatcttctgtccgactgttctgccatccgtatatatgaacgaatcatatcgagttccttctgcggttctatcaagatacgcaacggatgtgtagcccggtaagtatcccatatccagtcatctgtataaaaaggtactccgccatcttcatgaatcttgccatcgaaagcactgtaatatttcccgtcctccgaaagattgatcatgcgttcgtaggtacgataaagggaagtgtagaagatttctttttcgtcttccgaaccgccttctatcacaatcttgcccaatgtcttgttccatatcctgcgtccggcatccgccaccgcctttacatcataggtggtgatgtcacgttgcagattcttctttgcctgctcggcactgataaaggaaattccgtaacgtagattcaggttcttctcgcttccataatacaaagcgatggcactgccttccttactttccatatcaacttttccatctgccagtacccctttgcgtaaaggtagttgactggtttcgagatacagatagattttggtaggagtgttgtcaataacctgatagccactgactcctttttcttcagcgaccagctttccgttcttcgtattcaccaccagagcattatcaccttccgtcccaaaactgatatgataaataccagcctgatgtgaaggggcatactcaacctgtatatcagcctcatccaggtatacggaataactatagggggtaatattctccaaatcataggagtaagatacaatcggtcgggatacctctccctgcaccggactcaggttaaaagccgagctgcctctatgactggtcaccacgaccggaaggccgtttaccctgtccgatgtatagtctcccctttccggatagaccctgagcatcgagttcggcagatgtacggttgggtaagtaggcaccagcagatggctgatattgccgatatatggatttacataatcgacaaagtccttcacgggcgtctgatccgtatgggtacacgaaaaaaacgccatcgccatcaaacaggagccgactgttctttttatattcaatctgttcatcatcattctatatgaatatgtctgttcattaatcaggttagttcatcgttatctttccggcagcagcatccggatgctgcttcagatagatacgatagagttcaaaaaatgtcggtgcatccagcaattcaatattcgtatgccgctgtttcaactcatcacaaatccctttataccaggaaggtgacttcaatatggctctgaaccaatggaaaggaaccggacgtttctccactctttccacaatcacatccgttgccctgcggtaatcatgatctacaatatcataatctgcccggatcaccggcatatcattgtgcagcaatgtcaaaggcatcttctgcggaactattccattcggactgaacgatgcgtaacagtccaatccgtctgaatccagtccgggggcttcgccgtcaatcacaaatcctgtaatggtcaatccccacttctgataatatttgctgcaatgctttgcccatgcactcaatccgcttttcaatccggacaccgagcgaggctcttgcaacatacccggcattaaatatccggcaccattgtcagcagcggcaaaataatcattcggagtagccgtcacccgataattatgcatcaccatcggaacgcgttctgcaagtacaggactgacagaccacatcaaaggcacttctccccggctaggttcgtcccacaggaaaggggtagtctgagcaatccaggaggaggaatcataatcgcctacatagaagaggataaagttccgtccctgaaagttgattgttccgtcacggttcagatagcctctgtccatcagttcctgatgtgtcacccacttttggggatacttttcctgaagaggaaaatgttgccagaaggaggagttagccaatgctcccagtccgatggcatcggcatccttaaaggcattataagcactgataatacgggaaaattcccactcggtagctacatcttcatgctttcctccagcatgctgcgtatatttataaatccagctcgggaaacctccgatatagcagaatttctctcctttattttgcttataggcttcttgcagaaaagttttcagtatctgcaagtccagtccttcttcttgtgtcggatcatccgttgccggctcgtctccccaaggagaaaggtcaaagaaaaaagctttcttgctgacaaaaaagtcatgattggtcaattggtgatggttcgttaccgtccgggtaggatcggtacgccagaactggtcgatgtaataagcggcgtactccgtattgcataaccctttcttcaggtatttctctataaaccatacatagggatcgattttcagagatcctgtcgaaggttgaccggttccggcaatccttcctttgcccgtgaaaagagaagaaccatctttgttcaccagccagcatttcacagccagcttcggtccttgcagtaccaaacgggtatagagactattgggagatatgtcatagcgcacagctatcagattctcgattcctgccacagatgaagcaatattactggtagatgctacttttgagtcataaacaaccactccgcgtatttcttttctgaaaacggtcacgacatccgacagttccgtgtaagctatcgtatcacgtcccgccagccactgtcctgcctgacggtatttattccaccaataatcatcgacattctctccctgcccgttcttgacatagcgaatgtacaatctcggactattccgattcacaatgccttgcaaggtagctgtcgtatgcataatgtcccatagttgctccgccttctcctgttctttcagatcaagttcattgagcgttctcaaatccagtatccggaccggatcacgagattctgccaacaatatctctgaacaaaagacagagaccgcaaggaataccaactgtaaatactttctcatggcttttccgtttttatgctaaatatccaactgtacagatgccgaataattgtactttgtctcacttccgtgagactgtgcaccgatccggaaataataactcttgcccggaaccagcgtggaagtgtagtcttccagattgatagacaattcgaaagcctcaccatcagtaatggaacggtttagttcttctgtccggttgacaatattcagtttgttggatacatcgatgtgagagtgtgcaaacaacgaaatacgatagacctcgttactggtcacctgctccagtttgaatttcgccactacctttcttccgatcacagatatttccggttcaatgatccgcagataaggattcacttcgaagacctgataattctttcccggctttattttcatatccagagtatccaaaggaacgtagttcccacgattcaggatgattttatagtcaccggagaaaatcataccgttataaaacgttccgtcttttttaacgaccatattctgaacaggaggattatctccccacccctgttcgatgaaataaacgcgggaaccgtccgatatctcctgttgaatgagttctccggtcttccggtctctcagttcgccggcaaagattgcatccggcccttcgagattatctttttcacaagagtaaaacatactgcctgctactacaacgcataataaaaatagaagctttttcatatctaatctatattttagaatatactaattaaggattctgtaccagaccattagcccccgtacccggaatactcttataataccagctataatcaaaggtctttgattcaatgcccaacggattgacacgtacaaatacataatgcgcaggatttgtccgcaggtcaaggaaaggtacaagtccctttctcacccggttttcaaattccttatggaaagttctccagcgcgacaaatcccatctgcgtttgttttcaaatgccagctcgacaaaacgttctttgcgaacattcgcctgagtcaatgcaatgtcatctttgtgagccgctcttttgcggaccgcattcaaagcgtcttgtgcagcctgtttttcagcagaagtagaggttgtcttttcgataacagcttctgcatagttgagaagaatttccccataacggaaatcgatccaaggctgtgtacctttactccatgcctgctcaaccggactttctatctgcaagaacttcttaaacaggaatccgctgcgggtataatgtcccaaagtcggatcgaatcctgaatattccgtgcttttctccgctccgtaagtataatagatcagaccatcctgtcccttctccgaagcctgagtcctataatgataaccggaaccgtcagctttcaccagaccaccctggataatgatcttcgtacttccgaagttctgtcccgggaataacaccatggcactcaaacgggcatcacgaccggcaaatgcctggtaaggtttatctatcgggaaagacaggtatcgggtggataagttaaatccattataatcactttcatttccatccacacgagtgctgatcggcttgggtgttccggttccgtcatccgtataatcttcgaaagagtcgacaaaatccagtgtcggattcatacgaccgggatagagattcgggtcgaggatcatctgacgggggctgaaccagacatcatagttatgtgccagaatggtatttgcagcataggccttcatgaagataggctctttcaatccgtccagacattggaaaggttgttcaaataacttttgatagttggttgtcgcttcttccggagtagcgggggaaggtttgtaaagaccgaacttaccactattcatgatttcctgtgaagctgatatacattcatcataataatgatcagccgatataacttctatacctaccagcttctggtcaacagccggaccagagaaagagacataaggctgatgagtaaacttggcaacggaagctgcatacagagctgctcttgacttcagtgccaatgctacccatttgttcgctctcagcacatcattttcattcgcatctccaaaaagcgatactgcctggtcacattcttccaagacaaagtcccaagtatctttctccgtatttctggggacacgcagttcttcgatattaccgttatactcctgcggttctttaatgataggtaccccaccgtatcttttggctaaggcaaaataggtataagctctcaggaaatgagtttccgcattgatctcattcttttgctgttcggtaatactggtcaatgtaggaatagtaaccaacagactgtttaaatcacgaatgagtttataaccgtcttcccaataatcgaaccactcttctccaaagtcattgtactccggatggatagcctcatcacagaaatgagcagccataaaaccggcattattcacatccgtaccgactcccacattgaagccgcgattcggtgaataggtaaaatcttcgataggcaaacgaccgtacagattggccatatgtgcctgtactccttccggagtagagaacaattcatccgccggaattttattcttcggatcgatatcaagcaaatcgctacatccgcccagcaggaacatagctcccaataataaataactatatattttcataatcatcttctttaaaagttcaaggtcaatccaaagttaaagctcttattcagaggataattcaagccggcactatagtctccttcaatcttttccggatcgaatgcctttacaaacgggtcacagacagtaaacaggttatttccgttcgcatagattcttaaactaccgatacccagtttatgcatcagtcggggactgaaggtgtagccgatctcaattgttttcagtctcagataagaagcgttcttacgccatatctgcgaatccctcgtatagaacgatcccatgtcctgctccagacggatggccggccattctcccggtatccattcactgttcgcatcatacgggtcggacagatgccaacggtcgtagaagtattcgggggtattgccacccttgaaacagagcatctttgcgtatacctcgtcaaactgcaccgtgtacagggcagaaccttgaaaaagagcatagaagtcgaagttcttccaggatgcttccacattgaaaccatagtgaatcaacgggctgccggaccagaataaaggggtcttgtccagatcattcaccactccgtcaccgtttacgtctttcaggatgtagtcaccgggaagttccttggaatttccgttatccccattctgaatcggatatgtattaatctcgtcaaagttctggaaacgtccgtccgtctgatacccccagataaaatctccccagcggttggatgactggtttctccatctttccatactgctcttgtaaggaccgctctctatataacggcgttgggtacgcgccaagttaaagttaccggatacactgtagtggaaatcaccgattttgttggtatgagtcaatgtaaattcaatacccctcgtacggtcgccgttcaggttttcctgtggcaacttggaaccgaacgtattgggaagagaaccgtaacggtcggccaacaggccgctgcggtcacgctgataaatatcaaactctactgcgatcagccggttaaagattgaaaagtcaataccaatattatacatattcactttaatccaggtcagattcttattgatcatcacaggagaagctactccattggtataatttccctggctgaatacatatccgccactgttcaacgtgtaaccggagaagtattggaacggatcaccggcatcttgccccgaacgaccggcagagaaacgaagtttcagattatcgacaaacttgaagttgtctttgataaagctctcttccgaaattctccatcctacggaagcggacggaaagaatgcccatctgctgcccggagcatatcgataagaaccgtcgtatctgcaagcaagctctgccagatatttgcctttataatcataggtcagacgcccgatatgagaaagataagcctggtgttccgaggaaccggatactttctggtcagattcgcgtgcattgtccagttcaccgattgtgaaaaagtcaaacttgcgctcaccattcatccagtttgctttctcttcgcgtctttcgaagacataagtagctccgatggtatggttgccgaacgttctgttatagtttgtctgaaactgcatatccacccgttccgattctctgcgattatcctgaagcaaagccggatagttggcatctgccgctgtatactcgcccgtatattcgccataggtatatgtcttaaaacctttccgcgtagccttatatccgtagttattgtaatcgtagataaaagtacctttcaccttcagcccctttacataaggaatattatactctaatgcaaactgtgtctgcaagttcttattccgctctttagcgctgccggtataatcggcatcgatcatagctgccggattaggaacataagagaagttattataataatccggattgtcattggcatagatagaagtagtcggcggatttacacgcgtactcttaaatatatcatagaaaggaaaccagggacggttggtggtatcataacgtccgccaagattgatactggctgtcaggtctttggtaatcttcagactgacattggaacggaatgtatatttatcataagtcaatgcgttattcttcaacaagctgttatcggtggcataaccgaaactaccgtaataacttactttgtcggtaccaccttccagggacagagtcgtctggaactgtgtggcgtgcttattgaaaacggcatcatacaagtctacactctcataaccgggagcaccttgctgccatttggtcaattcgtcctttgtgatataagccggtctgcctgcattgatttccgcctcatttcgcatggtcatatattgtctggcgttggccatctccggcacattggtaggagaagtaatgccgacattggcgttcaacgtaatacgcggtttgcctgtagcccctttcttggtggtaacaatcacggcaccattcgccgaattcataccatagatagaggcagtagcatctttcagaaaagatatgctttcaatatcttccggattcaaccgttgaaattcgctggaaccgtctctcaccactccgtcaatcacaaacaaaggagttccgaagccacggacattgatattggaactgaacttacccggctctccattttcctgtctgatccgcagaccggctacttttccttgaatagcctgtgccaaactaggtgccttggtctttacgatatcatttactttcaggtttccgatagctcccgtcagactttcctttttctgaatgccatatccgacaacaactacatcgcccaatgctaccacattctcctcaagaactaccgttacgaagtttttattcaccactttcactctcttcggattatagccgacatatcctatctccagttcagctcccacaggaacctgaatagtaaacttaccatccatatcagaaatagtccccgtacccgttttcagtactttcactgaggctccgataatggcttctcctttattgtctgtcacctgcccggaaactttcagtttttcctgcgccataacagaatccaaagaaaggatgctccccattatcaaataaaggaaccttaaaaaaactctttgcaaatgatctttgctctttcctgttttcataatttatagattaacattaattaattcaaaccgttttcatctcaagaaaactttctctgacaagtaagtccaagcagtaattaagaagtgtcgtttttcatatttccatcattttataaggttatagtttgatccgctcaagtcatcagaaacatagtggaggatatcccgtccgtttctgaagcaaatatagaattccagtccttaatgccatattaattttagattaatagcgataaagcatttcatccttttcgcataagtatctagttatcaatgatgttttcatgataaaaaaacaattattatttgatggtataatgagtgccttactccgcaaggatttatttcgggcaccgatgagacctacttccggcaccgatgagaacaggctccggcaccgatgaaggcatacctcgccaccgaccaacaggaagtagcggaaaattattaatagaggattaatttagagtgaatttataatatcatcgtaagagaaatcaggcttggcattcagcaaacgttcatattcaatacagaacttatcgaaactttgcttggacaaacctttctgccccatctgatacaagactctgcatttagtgcggatagcgtcttcgtctatattatcaacaagcagaattacatctgatattttcagcaaaagcctggaatcttcttttatatcgggacggttgaccacagaaagcagtatttccgtcaacagaacgtagtaggctgacttatattcgtcaatccattcggcactgacgttagggagcaatgcgccggcactcgccagggatatgattttattgattatctttttgtccgtaatggtatcttttatctgatccagcaatctcatcacttcctgataatcgcaggtcacgtctttccccagattcagataccaatagccgttcttattggcaatattgatatctccgattttctctatgatcagccttagctttctgatattcacgtttctgttattcgatgcactggacttactcatatcgaaccagaaggtttcatccaggcattgagaagtcgttccctttccgttcttgatggtattcagcagtaaaaacaagaataattgcttaagagtaggcgtaaaatctcccgtgatgttaccgccttgcttatcaaagacctgaaatccgcccagtaataaaaccgaagatactttttgttcagtcggttcttcttcgaccaatctgtcttttacttcttccgtagcaaccggaccgactgacacattcacttttctctttctcttactatgcaataaccatatacttcctcctatcaggcacagtagtcctgccaaaataccagatatcaataccaccggcttcattccgccagtctgatgaggcaaaatatcttccttggacaaaggtggaaatgccagtttataaaattcgactttagatattccgggctctttttcctgcaacaccacggcataaatagaagatgtctctttatgtagaaacatatcacaataagaatgaatatcgaggaagttataaacaatggaatcactcatcacttcctgaaccggttgtctggtatgtatatcaaaccggctcaaataaacaaaagtattataccggtcattattatatgtcaaagcatatacactattcgacggtgtatcgataatcattgaattaccgaaagtaaagtgctgcctgtcattcacaaactcccataacttagcgcatttacctgttttcaaattcaaccggtaaagatcataaaagtttcccggagattcttcctgcttacccgactggttgccataaccacccatgatcaataagtagtcctcattctccgcccccatcgcacttaaatagcggggaaacagacaggaatcaagggaactgatcgaccacccctgcggatcagacaggtttattctgctcaactgtgaattatagcggtgatttccatagccaccaaaaacaatcagttcatctcttttctgattgataatacgattatgatgctggcgggtatcaatcattaccggagtttctaatgtccagcatttccggtcaaactcatagacattcaaattgttgaaatccggtgtataagacaagagcctgtttcgtttggcatcaaaaatcatctggctggaagctcctatataaggatgtcctttataagcaatcgaatcaatacgattcgccttcacatcgtaaacaaataactgaccgcctcctgctatgaaaaaacgtcccgacacatcgtcataagccacctgcggattaatatggtgcacattcaacgaagctaatgccgcccatttagtatgtttatctatctcccagacgccattacgtacaaaagcctgtttatttctgacactatcgtaagtcacatctttatcatgagcagccaattcccatttataaagtagtttaccttgaatatcagcagttctatattacgaatggtcataggaggtacatctgtagagaagaaacggggatgcttgctgcctccgaaatagatcttgatatccttaaagttgctcagggaatgattgatttccgcctggataccgtctgcagcaatatgaatccggtctttggtaaattgcagattgacgtgtatccatctatctgctacaatctttaccgaatctgcaatctctgtattcttgatcacccggtctttgtcagtcaatacaatattaaaccgggaataaagcaggtaggagataaaatcaaagcaagaagaatcatctgctatgacccgtacaacataaccataagtatacagctcatttctcaactttatatcgaatcccaccgagaaaccgtcctcgggaaaagacaaagaagccgcaggagtaagatccagattggtccgctgatcctgattggtagaatgagccagaaacgtgagaccataatcatagacactattatctataacattactcttgcatacccatatatgcaataaaaagactaaagatagaaggtatctacatttcatagtaacaatcataaaaaccggaatccttgttcaaaagtaagaaacttatgtctaagaccaatgcatttgattgcaatattcgcaaaaaattataggatatgcaaatcattggaaacaaaaagactcgcccaagtaaagtatccgagggatatctttacctgagcaagtctttcctttcataaatacggcccacttaacagccgtatctatattacaatatcaaatgtattattgagctgattctaccaatacaacacgattcagaatcggttgaccgaacttgtcgacaccaccacctgctgcaacagacagtctgtctgcagagatgccatatttcttaaccaacaggtccttaactgcttgtgcacgttccagacttaacttctggttgatagaaggagtaccggttgcagagtctgcatatccgttgattgtataggtcatgttcgggaattctttcatcttgctggcaagatatgacaagttcatttcttcttgtggagacaatttgtctgaaccaatcttgaagaatacggtacgcggtgcaatgttggcatctgttacaacgacttcttctgcttcttccactacaggctgctgtgcattggccaacagttgctgcaactgcatatttgcggctgccatagcattcatctgatcacgcatttgtctcaattccagttcggagataatctgtggaacaggacgttggaatccacgggtcgggaaataataagtcacaccgagagtagcacctaagataccatcataatcgggtttaccaccgtgttcaccgtcaaatttaccttccagacctgttgcactcagttcaaggttcaaatctacagcgtttgacaaacggaaacggttgataatacctgcattgaaggtagcagcgtttgtatgaggcttagaataagaatgagcccaaccggcaccgatatacggaataatttcatatacgcgatccggattgtaaccaccgaaaagtgcattcagattaatcagcaagtcaccatgaagattcatatagtcccatctctgtttgtaggagccatcttctctcggaccaccgactacatagtttgcagattcattggtggtgaatcctttggattgcagtccgctatattgcatacgcaatccgaaaccgggtgttacccatttaccaactgacacattcaatgtcggagcaatacgatctctgaattttccgatatggtcgttattaccaaataatacctgtgcaccgcctcctacagagaagaaccagttgctccagaatgggttagttattacttgatgtttatcttgtacctgaataacatcgtattcagttacagtcacggtttgctgcgcagaagcgacagacgcaacgccggcaaaagccagcaacattagaatctttttcatatacctaatagttaagtggttattataatcttttctttgttgaactatttaaataacacgaactgaactaaaaggttttaagaaatgatgattttatttgttttatttgaataatttctcgatgtcctcttccttgattgttgtcaagactgttttgccatccggagtgtaatttggtgaaggacaggcaaaaagactgtctacaagacttaccatttcctcattactcaacacctgaccatagacaatagccgctgcacgcgccagtgttaaagctaagatattctggatttcctccttcacatcattccctttttccatagctgtatgtagcatattccgtaccaactcaaccggattcaatccttctattcccgaaggaatgccattgatggcataactaccgccacccaaatcactcagatcgaaacctaccgccgacaaatcatccatgattccttgcaggacagccgcttctgaagcaggcagctgtaatatctcggggaaaagcactccctgcgaaacaccttgtttttgttttatctgcaccatataccgatcaaaaagtacgcggatatgcgcacgatgctggtcgatcaacatcaatccggatttcaccgaagtcagaataaaacgacctttgaactgcaaatgcagattccctttctcaatcaccgattcattggcatataaagtagaggaagccgatgagaaagtggaggaagcggcagataccgccgaaatagttttctcttcagcaaccatcggttcttcctcgaaaggagaattttcccaatccatttccggttcctgctgaggctcattcatcttacttgccttggtcaatccaccatacagtccttcccattccaccttcggacggctatatgatccgccgccacttccaccggaagatactttgaacggattgaaatccgaattataatgaatcttcggaggtgcaggaggcaggttctgctcaaatgcaggaatatccggcatatcttccgtatcgaaatcaatggaaggaatggcgctgaacttgcccaacgactcctttactgatgccgaaagtatttgccaaatagcctgttcattctcaaacttgatttctgtcttagtgggatgaatattcacatcgatattagccggatccacttcaaaataaataaagtaggaaacttgctcgccaacgggaatcaactgttcataagcctccatcactgccttatgaaaataaggatggcgcatataacgcccgttgacaaagaaatattggtgagcacctttcttacgggcagtttccggcttcgctatgtagcctgagattttcaccatcgtagtattcacctctatattcagcaactgttgattcagcttcttgccgaagatagcaagaatacgttgccgcaaaggagatacaggcagattaaacagttcggaatcattgctgtaaagcgaaaaggctacttcgggatgaaccaaagcaatacgttcaaactctgccagaatattacttagttctgttgaatttgctttcaggaacttgcgacgggcgggcacgttgaagaacagattcttcacagagaagttacttcccttggaacaggaaacagcttcctgactttcgactttggagcctgcaatcaccagttttgttcccagttcttccgattccaaccgtgttttcagttcaacctgcgccacagctgcaatggaagccagtgcttctccacgaaaccccatcgtacgcaaagcaaacaaatccgctgcttcccgaatcttagaagtcgcatggcgttcaaaggaaagtcgcgcgtccgtttcggacattccctttccatcgtctataatctggatgcaggtcttaccggcatccgtaactaacacatgtatattttgagcatctgcatcgatcgcattctccactagctctttaataacagatgccggacgttgtatcacttcaccggcagcaatctgattagctaccgaatcaggcaacaaatgaattatatcgctcatagtttatttagtagttaaaatgaccagcttcccgtcgctaaataatgccacaaatataaaaggaaagctatgataatcaatatgattccaaaagatacaggcttacggccacttgcctttctgcgcttcaggtgcgtcgtaccttcgacaaacttaccacggatatcttcgggactgaattctttatccggaagcattcccaactcgcgtttcgccttctcctccatcttctcaagcttttctttccgctcgtttacgtaaatgtattgatgattaaagcctcgaggttttctcatcgaattgaaaaacattcccatattacttcatattaattaaacttcgcttatctgtctttggcttccggtcggtggttggtttcagtgtctctccttccttcttgcctctccagttgaatatatcttctttatttaaagggcggacatagtcaaaccaggcaaatgtagatagccgcaacttgtcgggagggatctgatccatcggatataatgttccgttggacttacctacgaacatccctttttccatcttcttctctttcatataaagatggagcacactcccctccatattattaaatccggtcatcgtactgtctttttcttccgggtagaaagcggtcatcacattacctatcacttcaatatgacgcatatcaccattttcgaaataggctttcatctctttaccggacacttggttataatgaacagaatctttcatctccaccgtcagtgcctgattgataatgtgggcccagttaatggtactgtcattcatataaatcttgatctcctcgccaagcagttgctgaccttcattccaaagaatcggatcggtatacatggtcagacaagagtcttttgaattataaaccagtgagtcacaaactccctgtacatccgtccggtacatacgtaccttatgataagctttcatcaggcggaaaacagagtccgtattcagattataggaaataagctgcaacgtatctccatgcataaagagactgtctccttgtgaatagtcaatagcaactgcacgtttggtagcaaaagcagagtcggccaattcgttatagaaacaataatcgccggtcaacatattcttgttaatggtatccgtcattcgtatattatcgaacgcttcaccgtatcccactttccggtcataaaacaaactgtcaccaatcaacttctttccctcattcgtcaggatagaacggtccaacaattcagcctgttcgctgagtgtattatagaagcctcgttccgaatagatgtgattattgtcacttacgatattcgaaggaccgagaatggtagcaatcttggaaaaagtattatatttcagtgtatccgacgtcaggacaaacttgggattcaccaatttcacatcatgattgaataccgactgtttggtagccggactgtattctccccaatccgaggtcaacacattctcttcatccatcaaagtaccgccctcgaaataataaccgagatcataaagacggtcataattcagactatcggtcagaagcgtcgtgttccggttgatcatctttacgttctcacgaatctgcgcaatctgtgtcatcccgtcgtagtaaagataatcaccgtaaataaacaaggtatccccctgctccatacgtacattgctgaatgcttctaccgaattggttttctcgtaaatcaaagcactgtcacaaaacatatacatactgtcgtgacgcagctttacattcccaatcagtacctgaacatccggtcgggcaagcttgtcggcctgtccctgattggcatgaagcaaatatactttcgtcttcttattttcgggctctttcttgatatctttatcagtttgcttcgttccatttggagttttcgcagccggagtctcagcctttttagtctgtccggtaggcttcacctgcgccacaaggcatacggcaaacaggcatagaaagcctataagaagccatctatgcccgtcttgctgtttatcttttttgttttgtttcagcatataaagtcaagctgtttaaacatcaatcgttccttacccaacccggatacttgaagtcacacttctgccaattcgggtcaatacgtacatacgtatgtttttgtttgttcagaatccacttctgcaacatttcttcccggcgcttatccatcacgatttctttcaggtcctgatagtcttctgcaatggtagctttatgaccgttgatctttgctttcagttttacaatggcacaaacttcttttccatccttctcgttaatcatcgtaaaggctctggaaatttcgcctacattcatcttatccaccactttcgcaacatcctgaggcaaatcctgcatctggaacttagaagtagtgatacctgtacgctcattcgtattcaccataagaccgtgattattacgagtatccttatcctgtgaaatcacagaggcagcctcatcaaatgtaaacttattctgacggatatcatcgccaatagaatccagacgggcacaagcctcagtcaactccttttcagatactttcggacgcaacagaatgtgacgggtattcacacggtcgccacgtttctcgataagctggataatatgataaccaaattcagattctacgatcttagaaactttcttcggatcctgaagactgaatgctacattggcataagccggatccagcataccacgtcccataaaatcaagttcaccacctttgatagcagaagccttatcttcggaatacagacgtgccagtgtagaaaaatcaatttcaccctttgtcacacggtctgtataatcacgcagacgtctctttacatcttcaatttcagcaataggaattttaggttgcagtgtaataatctgcacctctacctgagtcggaatataagggatactgtcctgaggaagatccttgaaatagcggcgtacttctgccggagttaccttgatatctcctaccagtttctgctgcatcttctgtactgtcagtccgtcacgggcattttcgcgcaacgtttcacgaatttgagtagcagtcttattgaagtattcctccattttctccttagaaccaatctgctggatatacatattggtcatcatatctacacgctgaatgatttccgcttcggaaacttcgatactatccaactttgcctggtgcaggaataacttctgcacagcgatttcttcgggtattacacaataaggatcgccttcaaatctgcgtccattgtacaaggcatccatacgggcctcttctacatctgatttcaaaatagcttcgtcacctactacccaaactacctcatcaattacattgtcctgtgcataagttaccacgttggcaaatactgccaggacaagggtaacaataaatctaaagttcacaaacttcttcattctttgtatttaataattgtatataatcttcttcttgtttacagcctgctgatacaggtcattcttcacttgttccataaagttcacccgtttctgattgaccagtaaatccttcacttccgaccgggcaaactcatacggtttctcttcacctgccccgcgataatcgctcacattgaggaaatagtaaaatgccgtatctttcagttccacatgtcggtgcttgtctacatactgctccggtgacgcctctttcaatggaatcaagtccagaacatccgtaaccggaacccatttattgtaaaagtattcatacttcaccgcattctgcaaactatatttttccagactttccacagcatcctgtttttccgtcttgtaccatctgcgaacattgttcagctgaggtgccgtcaacggtactttaataaacaatcccttgatcagcggagattccaatttaaacaattccttgtttttctcataataatccgctatttcctgttccgaaatatcattcgtcagtttttgatttatcaattcctgctgataggtatgcataatcaaagctttcctgtaattctccaccagcttatctacatccacattatccggaatattattcgctgctttttcatacaacaaaatctcttccgcccaactacgaatgtaatgctcagcgaaaagaatactatcatcttttgacaatccgaccggtagtacagacatcaaatcttctttatacaaaaagttaccatctacctccaccaatgcagtcttgcctttgtggtcgtactgctctttgcacgctccacaacagagaagggtaattagtaagaggactaatattcgcattgtcaattcaaatctacttatttaaggtacgaagatagtgaataatcggttacatcagttattattaactgtttttaaaacctcttggtttatttcaaccttaccggactccctcaattcccgctcccaatatgcgttaagatagtttctataatcttttctcacctgatcaattacctctctgtaatcctccggtcccttctgttttttgcctacagcaatagtaaaaggataagacactacaggatcaaaagcgcccttcttaaagaccaatttatctatatatttattatctccgtcggcaaaaacaccctgttcaattttaattatttcagcaccggatgtattaaatgttttgcgaagcatatcctcccattcattctccggaacttttttcagtagctttttagcctgtttagcagtctttttatctgcacaatgcaacactactcctttgtatcggggatgctcccatcggtaatccgatgaatgaaacttaaaatacgtagccaatcccacccggtcgttaacagccggtaaatctactttctgatgcacgatttcctcagccaaacatttctctgcatattcctgcaaagtataacgaagttccggatgctttctttccatatgctgactctcataatccaacagagattttgctataaagccattcaactgtcgttttacagcctgaggatgggatgcagcaaaccgcttaaacatttcccctgtatatgcctgcccgtcgatggtaaacaaagtccgctccgttccacctttctgcaatacttcctccaaagactccatattcggaatatactggtattcctttttcagttgttctacgatggcttccgttcctttatccaacggctgacgccttaaacgatttagaaggctgtcactaacgacttcatatgcaggcacttcttttcgatctatgactttcagaatatgaatcccttccggagtaaaaaaaggtttggatatttcaccttttgctaaagagaaagctgcttcctcaaactccgaggttgtctgcaaactttctatccaccgacaacgtttatcatccgaaaaccgatccaccaaacgggcaaaatccacacccggctgattttgtatcacctgataaatagagtccatgcgagcctgttcctcctgtaaatgccgggatgtaatggtctgaggcagatatttgtaaatttgctgtatctgcacttgtccgccacgtacattttccttcatcttctgatatagaatacgggcattgccatccatttcctgatcatccagcaggtatgatctcagcaaatttgtccgataagcctcctgttgcttgcgaaaagccgaagttgtgtcgagtccggccgctctggctgcttccactttcaacttagactgaatgaaaaactccgcatattctttaggagacaatttcataccattaccgtccgcatgccggcgataggagtattcaaactccgaacgaggtatgtctttcccattaatccgcatcactacgggatcttcctgagcgaaagctaatactccgaagagacttatccatcctaaaagcagatttcttttcatcattgatttttatttaaaaacgacaaacggtgaacaacgaacatatgccatacagcctgttcaccgttcaccgctaatcgtttaccgtttatataaattattccggacggctatagttaggcgattcactggtaatcgtcacgtcatgcgggtgactttccatcactccggcatttgtaatacgagtaaacttcgcatcatgaagtttttcaatattagcagcaccgcaatatcccatacctgcacgaagaccaccggacaactgataaactacttcgtaaagtgtacctttataaggaacacgagcagcaataccttccggaaccaatttcttcacatcggcagttccgctctggaaataacggtctttagagccattctccattgcttccaatgaacccataccgcgatatgatttgaatttacgtccgttaaagatgatagtatcacccggagactcttctgttccggcaaccaatgatccgatcatcacacaatatccgccggcagccaatgcttttaccacatcaccggaatagcgcaaaccaccatcagcaatcagaggaacacctgtacctttcagtgccttggctacatcatatacagccgacaactgaggaacacctacacctgcaacaacacgagtcgtacagatagaacccggaccgatacctactttcactgcatcagcaccagcttctgccaaagccttcgcagcttctccggtagcaatgttacctaccacgatatcaatattcgggaagcgtttctttgcttcttttagtttttcaataacgtacatagaatgtccgtgagccgtatcgattacgatagcatctgcaccggcatccaccaatgcctgcatacgatccagcgtatcagcagtaacgccgacacctgcagctacccgcagacgacctttggcatctttacaagccatcggcttatcttttgcctttgtaatatctttatatgtaacaagaccgatcagtttgccatccattcctacaatcggcaacttttcaatcttatgtttttgaagaatctgtgcagcagattccagatcggtagactgattagtagtaaccaatctttctttaggagtcataacaagatcaatatgctttgtcatgtctctttcgaaacgcaaatctctgttagtaacgatacctaccagataaccttcatcatccactacaggaataccaccgattttatattcagccataattcccaaagcgtcgctgacagtagaacctctcttgatagtaacaggatcgtaaatcataccattttcagcacgctttacaatggcaacttgtcttgcctgctcctcaatagacatatttttgtgaatcacaccgataccaccttcacgggcaatggcaatagccattttcgcttcggtaaccgtatccatggcagccgtcacaaaaggaatttttaactcaatgtttcttgaaaactttgtcgagagatcgacagtgcgcggtaaaacttcagaataagcggggatcaacaatacgtcatcgtaagttaacccatccattacaatcttatcagcaataaatgacatagggctgtgcgtttaaaaatttattgcgtgcaaatatacggtttttattcaaaacagcatacctgcacgcctatttttttcgcttttttaattagccatttcagagatgaacttgattctcaccagtcggacttcctcttcggtaaattcatcgcccagttcgtcaagagcatcatcaatcttgtctgtcgtagattccttgaagtaatcatagatatcgagcatatgatcttcatccataatttcttccaggaagtagtcgatattcagtttagttccggagtaaacgattgcttccacttcatccagcagttcaccaaactcgattcctttggaaagagcgatatcgtccagcgccactttacggtcgatagcctgaataatagccactttcatctttgatttattggcaaccgtacgtacacgtaaatcttccggacgttcgatttcattctcttcgcaatgacgtttgatcagcttacagaactcttcaccatagcgtttcgcctttccggcacctacgcccggaatattctgcagttcatccaatgtcaccggatagatggtagccatcgcttccaaagacggatcctggaaaatgacataaggaggaacttccagtttcttggacagcttcttccgtaggtccttcagcattgaataaagagccgggtctaccgcacaagagccaccgccacgtgcaggtacttcttcttccgtttcttcaaaatcattatcttcagtaatcttgaacgattttggcttcttcaggaacttatgcccttcttccgtcactttcaggagaccataattctccacatctttgctcaagtaaccgccaatcaaagcttgtcggatcactgcattccatgttttgtcttcttctcccatacccgaaccgaacacttcgagatcttcgtgtaggtgagcctgtacttccgacgtttctctaccttgtagtatgtctatgatataatctgccttaaaattttctttcaccgcgataatcgcttcaatcacggcacataataactcttgagcctccacttgttttttagggtttaaacagttgtcacaatttccacaattttcttccgtatattcttcaccgaaatagtgcagcaatgtcttacgccgacacacggaagattcggcataagcagcggtttccaacagaagctgcttgccaatttcctgttctgccacaggttttccttgcatgaacttttccagtttctgcaagtctttgtttgtataaaaggtcaggcactggccttcgccgccgtctctgccggcacgtcctgtctcctgataatacccttccagactcttcgggatatcataatggatcacaaaccgtacatccggcttgtcaattcccataccaaaagcgatggtagccacaatcacttccaccttttccatcaggaaatcatcctggtttttcgttctcgtcattgagtccatacctgcatgataaggacgcgcgtttattccgtttgcctgaagaatttcagcaagttcctctactttcttccggctcaggcaatagataatgcccgacttttccgaattgttcttgatgaacttgataatatctttatcaatattattggtctttgcgcgtacctcataataaagattcggacggttgaacgaggatttgaaaacctgtgcatccaccatccccagatttttctggatatcgtgctgtaccttcggtgttgctgttgcagtaagcgcaatcaagggagctttccctatttcgttaatgatcggacgaattcgccgatactccggacggaagtcatgcccccattcggaaatacaatgagcttcgtctaccgcatagaacgaaattttcaccgaacgcaaaaaatctacgttttcttcctttgtcaatgactcaggagccacatatagcaattttgtttttccggcaaggatgtcagaccttacttggtctattgcgcctttatttaatgaagaatttataaaatgggcgatgccatcctcttcactgaaattacgcattgcatccacctgattcttcatcaacgcaatgagcggagaaataacaattgccgtaccttccatcaagagcgaaggtaactgatagcataaagattttccgccaccggtaggcattagcacaaaggtatctttaccatcaagcaagttctgaatgattgcttcctggtttcccttgaacttattaaatccgaaatactttttcagttcatctgttaaattaatcttccctgccatcttaacttaggttgttttattcagttcatggtttaactttaagtaaagccctccattgcaagagagccaaacaaagttataaacaacttcgtaattaccaagcaaaatacgactaatattttcaagaaaaaacagaaacaatcattttcagtagccttactatttgatattaagcaatttgcagccttgccatattcgctttttccagctgttgttttgcataatccagcgttaccttatactcttttttgctctctgaagggatttcaaacatgacatccatcatgattgtttccacaatagaacgcaatccacgggcacctaacttatattctacagccttgtcaacgatatattcgaaaacagaatcttcaaatgtcagcttgataccatccatttcaaacaacttgatatattgcttgatgatagagtttttcggctcggtaagaatagcacggagtgcattgcggtccagcggattcagataagtcagcaccggaagacgaccgattatttcgggaatcaggccgaatgacttcaaatcctgaggagcaatgtactgcatcatattattcttatcgatcactgctgttttctgcgatgcggtatatcctaccacatgcgtattcagccgttgggcgattttcttttcaataccatcgaaagcaccaccacagataaagagaatattcttggtattcaccggaatcattttctggtcgggatgcttacggcctccctggggaggaacgttcaccaccgatccctcaagcaatttcagcaaaccttgctgcacaccctctccacttacgtcgcgggtgatagaaggattgtctcctttgcgggcaatcttgtctatctcatcgataaacacaattccttgctcagcctccggcacattataatctgccacctgaagcaaacgggtcagaatactttcaatatcttcaccgacataaccggcttccgtcaataccgtagcgtctacaatcgtaaacgggacatgaagcaacttggcaatagtacgtgccagcaatgtttttccggttccggtactacccaccatgataatgtttgatttttcaatttccacatcatcaccgctgtctttctgcaaaagacgcttgtaatggttgtaaactgatacagaaagaaagcgtttcgcatcgtcctgtccgattacgtactggtcgaggaatttctttatttctaccggtttgggcagttcttttaagttgagtttggtagctcccgccctttttctgccttcgcccagggcttcctgagtaatctcataagcctgagtagcgcagctgtcgcagatatagccgttcattcctgtgatcaggaatcctacttcattctccgaccgaccacagaagctacactttttctttgtctttgaatcagccatttttattttttaatcaatacttcatcaatcattccgtattctttcgcttcctgagctgtcatccagtaatcacggtccgaatcggcccataccttatcaaagtcagtgtgcgaatgatcggcgatgatcgtataaagttctttcttcaatttctgaatttcacgggctgtgatttcaatatccgaagcctgtccctgcgcaccgcccatcggttggtgaatcatcacgcgtgaatgcggcaatgcagagcgtttgccttcggcaccggctaccagcaatacggcagccatcgaagcagccatacctgtacagatagtagcaacatcacttgaaataaactgcatggtatcgtaaatacccagtccggcatacacactaccgcccggagaattgatatagatagagatatccttgcccgggtctacagagtccagatagagcagctgcgcctgaagcgtgtttgccgtatagtcatctacttgtgtacccagaaaaataatgcgatccatcatcagtcgggagaatacatcgagctgagttacattcagctgtctctcttcgagaatatagggattcaaatacccggcttgcgatttaatcacatcgtccagcaccatgccattcattcctaaatgcttggttgcgtattttctaaaatcatccatgttattgttcctttctaattaaatttataataaacgtaagtgcaaagaaacgaaaaagaacacagagacacaaaaaaacacagagttataattttataaaaactctgtgtttctgtgactttatgttctattcaaccgaacgattattcaaacattttattgaattcttccatagaaacgttcttgttctccaaagttacctgagctttcaaagctgcagccagcttcacttccactacgcggcttaccaggttgttgatagtatctttcttcttcaacatttcctgtgcatagttatcaagcacatcttcgggtacagacaacattccgtattgagcgaactgtgctttggtagtttctttcgccatcttcagcacatcttcctgctctaccttaatatcgtttgcctctaccagctgttccttgatcaggtgccaagtcagttcttcaatgctcttatcgtagttttcggctacatattcttcgcctttttcttcgttgttcagcaacatgatacgtttcagcaatgcatcagagaattccagcttacctactttgtccatcatcactttacgaatgtcgatcaggaatttataatcgctgtcagcaacaaatcttgctgcgatttcttctttgatcttagcgcggaattcttcttcagtcttcactacaccttcaccaaatgcctggtcaaatacttcctgagtcagttcacccggtacgaaacgagtgatttcttctacctggaagctgaagtcagacttcacatccttagcgatttccttgtcgatcttcaacagagagccgagttcagcagcgtgtccgtcgtaagcaacattcgggttgaataccaatacgtcatttacttttgcattagcaaagatagctttctgatcgtcgttcttcatataagaaggcattaatacagcaccttctacctgaataccgccttctttcgtattaccttcttcgtccagctgagccaacagacctttcagcatgtcgttatcttcgtaaacgtctactttgtcgtatttaccggtgcgctgagtatacatcttcacctggttttcgatcatttcatccgatacttcgatcgtatagtaatctactttatctttagcgcttacttcagctttgaattcaggtgccagagcgatatcgaacacaaactcgaattcttccattgtatcgaagtcgataacctgctgtttttcttcgttaggcaacggttcgcccagcatgttcaccttattttctttaatatagttgtaaacagcttcttgcagtaccttattcacttcttctgcaatcactgatttaccatacatcttcttaaccaggctcatcggaaccattcctttacggaatcccggcatctgtgccttctgacggaatgatttcaacgatttgtctactttttcctgatagtcggctttctcaagcttcacagtaagctgtgcgcttactttgtcaatgttttgtaatgaaacgttcattctgacaattatttatttgatttatactttgttctaactcaaacgagggtgcaaaattagtgctaatctttcaattttcaaaagacattgcagatttatttcgcatctattttggaatatacaaatgacaattgcatgacaggcagcggttcactagccacgcatccttgtttttttctcgttgcctgcaaataaaagtaagaaaaagatggtcaatccaaaaattattcttttctttgctgcggattgatggaccattagtttctcgatttgattacaaggtttttacttctgtttcgaaaacgcatttgtaaactctctgtcgttttaatctttttattagtaaccatctatccagagagttttattcatttatttatttttttatcattttcattatgaacatttatgttggaaaccttaactaccgtgttaaggaaggagatctgcaacaagtgatggaagattacggagcagtatcatcagttaaagtagttatggatcgtgaaaccggtaaatccaaaggatttgctttcatcgaaatggaagacgatgcagcagctgctaaagcaatcgcagaattgaacggtgcagagtacatgggccgtacaatggtagttaaagaagctagacccagagcttaattgccgacgctaatatagctaagaaaaaaaagaaacttctgccacctgatgacagaagtttttttatgtccttctatttacttttccgtcagccttccatattctgcacttccatatccttcactttacgaagcaggtccgaagcaaagataaagttattcagccgttcattggtagaagtgaaaatatcatctttcgtcccttcccattccttatgtccttcataaatataaatcactttctcaccgattcccagcacagagttcatgtcatgggtattgataatagtcgtcatattatactcctgagtgatgtcatgaatcaggtcatcaataactaatgacgttttggggtccagcccggagttcggttcatcacagaataggtactgcggattcaatgcgatagcacgggcaatagccacacgcttctgcataccgccactgatttcacccggaaatttatctttcgcctcagtcagattcacacgttccagacagaacatggcacgcttggtacggtcacgcagtgtatcgttgctaaacatattcagcgggaacattacattatccagcaccgacatggagtcaaaaagcgccgcactctggaaaatcatccccatctccttgcgaagcatctttttctccttcttccccatcaagacaaggttacgtccgtcatacagcacttctcctttttcgggagtaagcaagcctacgatacatttcatcaagaccgttttaccagagccgctctgaccgataatcaggtttgtctttccattctcaaaagacgcattgatattactcaataccgttttatcttcaaatgatttataaagtcctctaatatcaatcatcccatcaaaagtttagttaataccaaatctgcaaacagaatcaacacactactgcttaccacagcatccgtagaagcctttcctacagcaatggaaccaccatctaccgtatagccgaaaaaggcagaaacacttgcaataataaaggcaaagaaaagggattttatgatacccgcccagataaaccattcgacaaacatatactgcagtccatattccagatcgaccgcattcatcacaccggcaaaccaacaggtacaaaaagcaccgataataccggcaaaaatactaaacgtcaccaacacagggatcacagttaccatggccgttattttgggtagtatcagataattggcggaattaatacccattatttcgagtgcgtcaatctgctgcgtcacccgcattgttcccagttccgaagcaatgttcgagccgacctttcccgccagaatcaaacacataatagaagaggagaactccagcaacataatttcacgtgtcacatatcccactgtccagcgaggcatccatggactttcaatattcaatttaatctgaatagtaatcaccgcgccgatgaaaaacgaaatcaacaacacgatgccgatggagttcacacccagttgctccatctcgttaaggtattgccggaaaaacatacgcatacgctcgggacgggaaaaagtacgtcccatcagtatgatatatcgtccgacagttctcaatgcttttatcataactcacactatttgtctgcaaatgtacattatttcagcttatttttactacatttgccgcaaaataactagaatatggaagaaagcaagatggtgcttcgcacggaagacctggttaaaaagtacggtaaacgaaccgttgtaagccatgtatccatcgacgtgaagcaaggtgaaattgtgggtttgctgggaccgaacggtgccggtaagacgacttcattctatatgaccgtaggactgattactcctaatgaaggacgaatctttctcgacgaccttgagataaccaagtttccagtatacaaacgggcgcagacaggtatcggataccttgcacaggaagcctccgtattccgtcagatgagtgtagaagacaatatcgcttccgtactcgaaatgaccaataagcccaaagattatcaaaaagacaagctcgaaagtctgattgccgagttccgccttcagaaggtacgcaagaacaagggtaaccagttgtccggaggtgaacgccgtcgtactgaaatcgcccgttgtcttgccatcgacccgaagttcattatgctcgatgaaccgtttgccggagtcgaccctatcgcagtagaagatattcagcagattgtgtggaagctgaaggataaaaacatcggtatcctgattaccgaccacaatgtgcaggaaacattaagtatcactgaccgcgcttatctgctgttcgaaggcaagatcctgtttcagggaacaccggaagaattggcagaaaacaagattgtgcgtgaaaaatacctgagtaacagtttcgttttgcgccgtaaggacttccagttaaataaagacgaataatcctcttaaataaaaagaaatcgcccggcaatggaatattgccgggcgatttctttttattcatacgaatataccttttacttctgtcggatataaatattgatcggtgtaccggtcaggttccacttctcacgcattttgttttccaggaaacgtttgtacggttccttcacatactgcggcaaattggcgaagtacacaaatgaaggcacttgtgtattcggcaactgcgtgatatatttaatcttgatatatttacctttattggatggaggcggatatgcctcaatcagcggaagcatctcttcgttcagacgggcagtcggtatcttcgtcgtacggttttcatacacgttgcgggcttcttcaagcactttcaggatacgctgtttggtcaatgcagaagcaaatataatcgggaaatccacaaagggagcaaaacgtgaacggatagtcgcttcaaactccttcatcattttcgctgttttatcctctatcaggtcccacttattaatcacgactaccagtcccttctgatttttctgaatcaaagaaagaatattcaaatcctgactttcaacgcctcttgtagcatcgagcatcaaaatacagacatccgcattttcaatcgaacgaatcgaacggactaccgaatagtattccagatcctcgttcaccttattctttttacggataccggctgtatctaccagataaaaatcaaatccgaatttattgtaacgagtataaatagagtcacgggttgttccggcgatctccgttacaatgttacggtcttctccgataaacgcgtttacgatagaggattttcccgcattcgggcgtcctaccacagcaaagcggggaatatcatcatccagaatttccgaagtctctttattgaatttgctgacgatcaagtccatcaaatcacctgtaccacttccggtgatagcagagatacaatacggatcgcccaatcctaatttataaaactcaggagcgttatattgtaattcattattatctgtcttattggcaaccataatcaccgggctgttagcacgtcgcaagatagtcgcaacctgcatatccaggtcagtcactccgttcatcacatccactacaaacagaataacgtctgcttcctccacagccagcaatacttgcttccggatttcctcttcaaagatatcgtcagagttcactacccatccgccggtatctaccacggagaactcacggcccagccattcggacttgccatactgtctgtcacgggttgtacccgcttcttcattcacaattgcctgacgagttttcgtcagacggttaaataaggtagacttgcccacattagggcgtcctacaattgcaactaaattattcatagctcaataccttgttttttcacgactatcccagtcgcatgaatactcttaatctaactgataaccaaagttccgcagttccttatccgaactacgccaatctttatcaaccttcacataagtttccaggaaaatcgtctttccaaagaaacgttccaattcccggcgtgcttcggtagctacttttttcaatgcttttccctgcttgccgataatgattcctttttgtgaatcacgttccacataaatcactgcccggatatgtatttttttcgcttcctctttaaattcttccactactacttccaccgaataggggatttccttatcataatatagcagaatcttttcacggataatctcattcacaaagaagcgggcaggcttatccgtccactgatctttgccgaaataaggaggagaatcaggcaacagttcctgaatacgcttcatcacatagtctacattaaacttagatgcggcagaaataggaataatctcagcctgcggaagcagttccttccactcttcgaccagtttgatcagcttctcctgatccgtaaggtctattttgttgataagcaacaggacaggaaccgtcatctgacgcacctttcccataaactcattattcttatcgggcgtctccaccacgtcagtcacataaagcagtacatccgcatctgtcagtgcagaagttgagaagttcagcatcgactcctgcaacttatagttaggtttcaatactcccggagtgtcagaaaaaacaatctgcatatcatccgtattataaattcccataattcggtgacgggtagtctgcgctttgaaggtagcaattgatatacgttctcccaccaaagcattcatcaatgtcgactttccgacattcggattccctacgatgtttacaaaacctgctttatgcatttctctttattttattggttgagacaaaaaaacgcatcgaatcgaaataggatgcgttttttgtgttataattcagtaacttacgttacgattccttttttccgtcataaccccattttacataaaccgcaccccatgtaaatccggcgccgaatgctgtaaatataatgttatcacctttctttagtttatcttcaaaatcccagatacacagaggaagcgtagcggcacttgtgttaccataatgttcaatgttcaccagcactttatccatcgggagttccatgcgatgagccacagcttcaatgatacgtacatttgcctggtggggaaccacccagttaatagtatctttggtcagaccattcttttctgcaattgcagccgatacatccgacatacttgaaaccgcgtatttgaacactgttcttccttcctggtgcagatagtgcattttattgtctacagtgaaataagacggaggacaaaccgaaccaccagctttcatatggaggaaaggcaagcctttaccatcagttctcagtatcgaatccataacacctaaatcttccgtagtgggctccatcataaaagcagcggcgccgtcaccaaagatagggcatgtagcacgatctgtatagttaaccattgacgacatcttatcggcaccgacaatgataattttcttatatcttcccgaacgaatgaaattagcagctgtttccatcaaatacaggaaaccgcaacaagcggcctgcaaatcgaaagcaaatgcgtttttcagtccgagtttatcgcaaagaatagaagctgtagaagggaagtgatagtcaggagtagtagtagcaacaataaccaaatcgatatcgtcaggattggctccagtcttcttcatcaactgcttggcagctttgcgtgccatgtatgagctacctaatccttcctcattcagaatatgtctttcctttactccaatacgagtcataatccattcatcgttggtatctaccatttttgatatctcttcattagtcaagatataatcgggtacatatcctccaactcctgtgattactgcatttattttttccatcaaacctattttaaattagcgatactataatacttaaagcagccggagagttttccccctcggctgtcttgagtatactgtactaattatacagctgcttctttttcgatagcgagcttacctctgtagtaaccacatgcgccacatacagtgtgataaacatgccattctccgcaattcggacaaatagccaatgtaggagctactgccttatcatgagttcttctctttgctgttcttgtttttgattgtcttctcttaggatgtgccattttcttaaaactttaattattatctaatattttttttaattcattccaacggggatcaatttgttcctccatttcctccgcaactacgatatcatctccacctgtgtcgaagacttcatcgctatcttcattagcatctgttttgagatgcttgctcaacttgctagtaacagctttgttgcacttacccggagcgtgtacatgcttcattgggatagagagtgcaacgaattcatacatgaaccatgcaacattgatttctccctcttcttcagggatcacaatcaggttgtcgccttcctctgcatattcatgtccaaacttcaccatcagtttgtcagacgaagtgatctgtagctccatttcgtccaggcaacggtcgcatggtacccatactataccgtctgtctgaaagctcagttcgaaagcacgagaggttcttttcacagtcaaagtaacatttacttttcctttctgaacttcaggaccatcaatgtgggcgaagtaaaggttatccaaaacaaactcatacttagcagagtctgtttgcatgcctttcaaatcaattttgtatttatcaaactttcccaaagcttctctcttttttaaatcgttagattacaattcgggcgacaaagatacaaataaatatcctcataacatacaaattaccagtaaatattcacttttttaataggtattatgaggattattgctgttaaaaatgatgtcacaaatttcagaaggacaaaaaacaataaagcccttctggtatttctacctgaagggcttctctaaaaacggcggctacctactctcccactgttacgcagtaccatcggcgtgacgaggcttaacttctctgttcggaatgggaagaggtggaaccctcgtgctataaccacctgaatttcttcaattgacaatggacaattgacaaatgacaattatcgcagctgtcatgataagttatgacatgataaaaagtaaaattcaagtatctgttaatctaattgtcaattgtcatttgtcaattgtcaattaaaaaagctaaacgtatatatcgcgatccgcaccgtccgaaagaaagtgaacgggcaattagtaatgctcggctttgatgttaccacctttacacctgcatcctatcaacgtcatcgtctttaacgaccctaagaaatctaatcttgtggctggcttcgtacttagatgctttcagcacttatccaatcccgacttagatacccagcaatgcacctggcggcacaactggtaaaccagcggtcagtccaacacggtcctctcgtactagtgtcagagccacgcaaatttcatacgcccacgatagatagagaccgaactgtctcacgacgttctgaacccagctcgcgtgccactttaatgggcgaacagcccaacccttgggaccttctccagccccaggatgtgacgagccgacatcgaggtgccaaacccctccgtcgatatgagctcttgggagggatcagcctgttatccccggagtaccttttatcctttgagcgatgtcccttccatacggaaacaccggatcactatgctctagtttcctacctgatcgacttgttagtctcccagtcaagcgcccttatgccattacactctacggacggttaccaatcgtcctgagggcacctttagaagcctccgttactattttggaggcgaccaccccagtcaaactacccaccaaacagtgtcctcgtaccacgagttagaactcaaataatcaaagggccgtatttcaacagcgactccacaaatactggcgtacctgcttcaaagtctccggcctatcctacacatcaattacccaaattcaatgttaagctatagtaaaggttcacggggtcttttcgtcccatcgcgggtaatcggcatcttcaccgatactacaatttcactgagctcacggttgagacagtgtccagatcattacaccattcgtgcaggtcggaacttacccgacaaggaatttcgctaccttaggaccgttatagttacggccgccgtttactggggcttcaattcaatgcttctcttgcgatgacatctcctcttaaccttccagcaccgggcaggtgtcaggctgtatacgtaatctttcaatttggcacagccctgtgtttttgttaaacagttgcctggacctattctctgcgcccaactctcgttgggaccctttatcccgaagttacagggtcaatttgcctagttccttaaccgtgaatcactcaagcgccttagtatattcaacccgactacgtgtgtccgtttgcggtacgggtacctcaaggattaagtttagcggattttcttgggagtatgattacacgcactattggattgttccgaagaacgctccatactatcaggttcgactcttatcccggatttgcctgggataatcagcatctacacccttcaacggactattccgtcagtccgcggcgctgtcacgcctccgtctccacgtcactccttaaggtagtacaggaatattaacctgttctgccatcggcctcaccgttcggctgagccttaggacccgactaaccctgatccgattagcgttgatcaggaaaccttagtctttcggcgagggggtttctcaccccctttatcgttacttatacctacatttgcttttccacacgctccagcaaagctcacgcttcaccttcgacgcagagtggaatgctcccctaccgatcattactgatcccatagcttcggtaaaacacttaatgcccgattattatccacgccaaactcctcgactagtgagctgttacgcactctttaaatgaatggctgcttccaagccaacatcctagctgtcttagcaatctgacttcgttagttcaacttagtgtttatttggggaccttagctgatggtctggattcttctcctttaggacatggaccttagcacccatgccctcactcctgtgatagaactaatgcgcattcggagtttatcaagacttgataggcggtgaagccctcgcatcttatcagtcgctctacctcacattagtaactcacaaggctgcacctaaatgcatttcggggagtacgagctatctccaagtttgattagcctttcacccccaccctcagttcatccggaagcttttcaacgcttatcggttcggtcctccagttagtgttacctaaccttcaacctgaccaagggtagatcacttggtttcgcgtctactccttccgactcgacgccctgttcagactcgctttcgcttcggctgcgcatctcaagatgcttaaccttgccggaaaaagtaactcgtaggttcattatgcaaaaggcacgccgtcactgcttacgcagctccgaccgcttgtaggcgcacggtttcagggactatttcactcttctattcgaagtgcttttcacctttccttcacagtactggttcgctatcggtctctcgggagtatttagccttaccggatggtcccggcagattcacgcaagatttctcgtgtcccgcgctactcaggataccactacgcttaatttgacttcgtataccggactatcaccgtctatggttccactttccagaggattctactcgtcaaatgtcttgcgacatcgtggtcctacaaccccacacatgccgtaacatgggtggtttgggctattccccgttcgctcgccactactaggggaatcattattattttcttttcctacaggtactaagatgtttcagttccctgcgttagcttccatcaaagatggatgacattccttcagaatgccgggttgtcccattcggaaatctctggatcaaaggttatttgcacctacccagagcttatcgcagcttatcacgtccttcatcgcctccgagagccaaggcatccgccatgcgcccttgcttactttctttcaaacttacctttaagtatcaggtatcaagtatcaggtattaaacccgggtactcaatatcgcggtacttaaaacgtacggttcgatatatacttttagctctttactaaattttactttttgtacatcatgtcaaagatcgtttctctgttttcagagatggtggagaataacggattcgaaccgttgaccctctgcgtgcaaggcagatgctctagccagctgagctaatcccccaagagtaattgaacatcgcaataacgtattggcaacgacaatttttgttcggagtagtcccaggcagagttgaactgccgacctctacattatcagtgtagcgctctaaccaactgagctataggactagttcaaccttgtctacctgatgttagactcggcttctttatttctcttgtttatctctatctatacttctatagatggttgatctatatgttataaataaacaagtaccagtagtacaataatagaacctatgaaatcgttgttacgacatcgctccagaaaggaggtgttccagccgcaccttccggtacggctaccttgttacgacttagccccaattaccagttttaccctaggacgctccttgcggttacgtacttcaggtacccccggctttcatggcttgacgggcggtgtgtacaaggcccgggaacgtattcaccgcgccatggctgatgcgcgattactagcgaatccagcttcacgaagtcgggttgcagacttcgatccgaactgagagaggcttttgggattagcatcctgtcaccaggtagctgccttctgtaccccccattgtaacacgtgtgtagccccggacgtaagggccgtgctgatttgacgtcatccccaccttcctcacatcttacgacggcagtctctctagagtcctcagcatgacctgttagtaactaaagataagggttgcgctcgttatggcacttaagccgacacctcacggcacgagctgacgacaaccatgcagcaccttcacatttgccttacggctatactgtttccaatatattcaaatgcaatttaagcccgggtaaggttcctcgcgtatcatcgaattaaaccacatgttcctccgcttgtgcgggcccccgtcaattcctttgagtttcaccgttgccggcgtactccccaggtggaatacttaatgctttcgcttggccgcttactgtatatcgcaaacagcgagtattcatcgtttactgtgtggactaccagggtatctaatcctgtttgatacccacactttcgagcatcagtgtcagttgcagtccagtgagctgccttcgcaatcggagttcttcgtgatatctaagcatttcaccgctacaccacgaattccgcccacctctactgtactcaagacagccagtatcaactgcaattttacggttgagccgcaaactttcacaactgacttaactgtccacctacgctccctttaaacccaataaatccggataacgctcggatcctccgtattaccgcggctgctggcacggagttagccgatccttattcatatggtacatacaaaattccacacgtggaaaactttattcccatataaaagaagtttacaacccatagggcagtcatccttcacgctacttggctggttcaggcctgcgcccattgaccaatattcctcactgctgcctcccgtaggagtttggaccgtgtctcagttccaatgtgggggaccttcctctcagaacccctatccatcgaaggtttggtgagccgttacctcaccaactgcctaatggaacgcatccccatcgataaccgaaattctttaataacaagaccatgcggtctaattataccatcgggtattaatctttctttcgaaaggctatccccgagttatcggcaggttggatacgtgttactcacccgtgcgccggtcgccatctccagtttgcaagcaaactgaaatgctgcccctcgacttgcatgtgttaagcctgtagctagcgttcatcctgagccaggatcaaactcttcattgtaaaagtattgttagtcagcataaagctgatttttgctctgttcaggatgccgtacaatttattgacttcattaataccttacgtctcatgcatattactatatatataagacaagtattgacggttctatttttttcttgtactacttgtattgtttatcaatatttcaaagaacttgctgctttcgttttaaaagcgggtgcaaaggtaagaggttttatttaaactaccaaatgttttcggaagtttttttcgcttttctttttctatcgtttctcagactctcttagcgaaagggaaagaaggtaaagaagaaaaacaaaacgccttttctttgcgaatcggactgcaaagataagaacttttagctttatcttccaaactttatcggaagtcttttttgttcttatggtcaagcagtactgcgcttttacactaagtcaatttaacaaggctttcttctcttggaaagcgggtgcaaaagtacgcccttttcaaatatactccaaacttaaatcactctttttttgaattatttttgaggatagaagctaaagtgttgaatcataaggatgttgtagaacataaaattcttggatgtaggaggaacagaggaaaggagtgcacattattatattcacacgcgcgttagaagggcgagggcacgggcgtatgcacaagggaaaggaagaggaaatacaggaaaggtgaagaagatgcgcaaaggaaaccagaacgggaatccaaagaaaaggaaaaaaggacggaggaaaaggggattgaaagactgaaaaggaagaaggcaggaagaaggggaaatcgtagcaagggaggaaaatacgaaaaaagggtagagacaggagtcttttaaagttctacactcttggaaaaagaaaaaaactctgccatccgcaacaattcgattaacattcttagggggactgactaaaaagtcaatagtatcttaaatatcctccttcccgaaggaggagaatggagatactaccgacttttcagttaacccctacttacgtgtcagccaggctctctatgaaaataaaaaactataatttgctgtcatctgtcacgttgtcggatgtaattgcttgaatatgaataattaatgaggtgacagaagtaggtgatggcagtgtgacggcaaattttgctgtcacactgccttttttcaatggttacttatgggctgttggttgggctatacagagctttttagtttctcccgcttgaaacttttgtttctcatgcttgaaacttttgtttctcctgcttggaactaaagtttcatcggcttgaaactttagtttcaaagccgtgaaaccaaagtttcggacgcttgaaaacagtggttccagccgatggaatgaatgaaacaaggcaggaaactgatcccttactttgtacttccctaataatggttgacttgtttatctctaatagctgctatgtgttgactagaaatattactaaccctggcagctgtttactttattatttattattcctgcctccggtttacttatttttttcttattcctttaaccggttgactcttctctttgaaagaagaaaaaagaaaggaactcaccctttttcctctttctatcccgctagcagggcattcttggtcttttcataagcaaatgtacatatttatttttaagcaagtgctacattcagatacttttctctgtagcttatccatcttttcctgataggtccttgcatttctcctgcctgtaccggggtaagcatatccaagctcatatgaggcctttcgttgttatagaagtgaacggctgttgctacagcttttctgacttcctgtattgaactaaagcgcattccttgcagcaattcattctttataatgccattcacacgctcagctatggcattgtccttgggattgccatcctctgtcatgctgggaagaatcccgttatgtcgtaatatggcaatataatccgcactggcatattgtacgcctcggtcggagtgatggatcaaacccttaatctcctttgcagctatgcgtctgactgccatttccagagcttccactgtgtaacagcttcccagagtatcacctacgcaatacccaatgatctccttcgtataggcgtctgtcaccagagacaggtagcagaacacataactgccgtcaggcaaccatatggtaatgtaagtgatatcactaacccacagctgatcaggatgttctaatagcaatgtcctggttaaatcaggatactgtggcaagtgatgagaggagtctgtcgtacgtggagcccgaaaacgtttgcgtattgtcagcttatacttggacaatatagcacagaaacagtcacgcccaacaaaggcctggctggtgccgaactcattacggtacatcagccaaagtttcatccccccaataccagggtcctttgaacgcacacgtttgacaaactcaagaacaaaacgttcacgggccgaactatccgtactatggtcaacatacttataaaaggcttgctttgttacaccaaacaatttgcaaagagagaccaccgtataggcatgcctccctttacaaagcctttttattgtttggtaccagctttttttcggataggaagattaaacatctcctcggcaacatcaatcatcgtatcgaaggcgtgcgcacgcattttagcatctttaagctctgcacgtaaacgctcattctcaagacgtaaggcagtaattgaggaggattcctccgaggacttgggagacttgtgctttttcatataagcggatatttcaggattagaatcctcaaagatacgaacccaacgccaaaatgtaatacgggcaatccctttttcttgggcaaaacgagaaactgagaaattcgaacgatagaaatcgccaagaagttcaagctgataaggactaaaggtcatgtcactctttttcatcttttattcattttagttgatacttatagtagtcaaccaaatccagggtaagacacttatatgattcaattaacttgaccgcaccaactgttcgattaacctactcttccaagaaacaataaatcacttatcactcaaaaacagcggagttatcaactattaaaggatgatttatcaattattaatgtctgaaatatcaatcgttaagaattgacacctcagacattaatacactgtaaatcaaatgacaacatcaaacaaatgacagataatgatacatggaagagtgagagcaaacacttgctctcataactgctaccacacttgctgccatacctgaaactaagatgaataaagggatgcagacaaattgttagagcatgagagcaaaagtcgcgttgaattactgtggagaaagcagcgtaagctgtttgagtttgcaattgattcttctgtcatttgttttagcaatccggttatgcttgattcggaatgaagcaacatattcggctaccgaatacaaagcagaaatctttgactcgcgctacagatacattcatcagacttttattgttttctatataaaaagcaaccatcttcgcccaatacacagtggaaataattaagaatccggcattccttccgtacgtgacaaatatagataattctaatctgatcgaaaatgacattagtattttttccatcttgcacacatatgtattacaggaaaaacttcttttcaatgcttacatgtttcgtctatatataaaatcactgttaaatcactccgcaatctcaaacaaaaaggtcatctgtctgttacatacccgacttgaatatagtaacctaaacttttaaattatggctagagaaagcgtaaaaatcttacaaggaaagcttgatgtagaaagcttgatttcacagttgaatgcagcattgtctgaagaatggctggcatactaccagtattgggtaggcgcattggtagtagaaggcgctatgcgtgcagacgtacaaggcgagttcgaagaacatgcagaagaagaacgcagacatgcgcaactgcttgccgaccgcattatcgaactagaaggagtacccgtattggacccgaagaaatggttcgaactggcaagatgcaaatatgatgctccccaaggatttgattctgtaagtctgctaaaagataatgtagcttctgagcgttgcgcaatactgcgttatcaggaaattgctgactttaccaatggaaaagatttcactacctgcgacattgccaagcatatccttgctgaagaagaagagcatgaacaagatcttcaggattacctgactgacattgccagaatgaaaaaatcatttctcgacaagtaatttccgactcgtcagagaatgagcgaaaggcagtcttaaaaagagaatatcaaaacattctctcttcaagattgccttttttcacaaatatatgcgaaaacgcccccgaagtttatactcctttaaactccttttgaacaattttcgtcctgattggaacaccgcatttcagttgattcctcctacctttgcaaccacacttaatcataaagtgcatagaaaacaggtataaagagtataaaaagaaaagactatggcaaatcaattatcaagaactgatagttcatccaatcaggatatcagacaacgattcaacgtaaaaaaaacaatcatcggagttattgttttattaataggattatttcacttacctgaagcgatcctcctcattatggacggcatttctttagatagcatattgtatcttatcggcaatatattactctgtctgcttggcatataccaacttaaattccgttccagggaaatgagatatctgccgactaaaagcgtagtcaaagagaaaaactattctttcaatctgaaataccttgaaccattgaaagagatgatcgaatcaggcaatttttctaacaatatcaatattgagaaaggaacaggcggaaatcttcggctggatgtcctcatgtcggctgacaagaaattcgcagcagtgagattgttacagtttatcccttacagctacattccggtcatggatatgcaatatctgcggaatgacaagatcgccgctctggagaatttcctggaacactctaaataagggtccgttttattttatccatccccacttttatgtaatagtgcgataaaaaccaaactattttcaaacaaatcaagaagaaatctttcttttttcgtatttttgtcccaatatgcacgtttaattcaagtagacaacgaacatcaacgaaaaagaatgagagtaattgatttaatacataacagcgaaaaaacagctttctctttcgaaatccttcctccactgaaaggtacaggcatcgaaaagctgtatcagactgtcgatacccttcgggagtttgatccgaaatatatcaatatcaccacgcatcgcagcgaatacgtatataaggatctgggcaacggacttttccagcgaaaccggctgagaagacgcccggggactgttgccgtagctgccgctatccagaacaagtataatataacggtggttccgcacatactgtgcagcggcttcacccgtgaagaaaccgaatatgtactgctcgacctgcaattcctcaatatcaccgatctgctggtacttcggggagataaggccaaacatgaatcagtattcactcccgagggcgacgggtaccatcatgctatcgagttgcaggaacaaatcaataacttcaataagggaatctttgtagacggctcggagatgaaagtaaccaacagtccgttctcctacggtgtggcttgctatccggagaagcacgaggaggctcccaacatcgaatccgatctcttctggctgaaaaagaaagtagaagcaggggcggaatatgctgtgacacagttattctacgacaataagaaatacttcgaatttgtagagcaagcgaaggcagcaggtatcaatgtgcctatcattccgggcatcaagccattcaagaagttgtctcaactcagtatggtgcccaagacattcaaagtagacttgccggaagatttggtcaaggaggttttgaaatgcaagaacgacaaggaagccgaacaggttggtatcgaatggtgcgtcgcccaatgcaaagagttaatggcacatggagtgccaagcatccacttctactccatcggagcagtggacagtatcaaagaagtggctaaaatcatttattgatatgtttttcagagacgtaatcggacaagaagaaatcaagcaacgactcattcaggaagtgagtgaagggcgcataccgcatgcccaactgatctgtggccccgaaggagtcggtaaaatgccgctggctatcgcttatgcccgctacatcagttgcaccaaccggggtgagacggatgcctgcggagtatgtccgtcgtgtgtgaaattcaacaaactggtacatccggacgtacatttcgtattccccatcgtgaaaagttctaaaggaaaacgggaagtgtgcgacgactatatcgccgactggagaccattcgttctgaagaatccgtacttcaacctgaatcactggctgagagaaatggatgccgagaatgcacaggccatcatctacgcaaaagagagcgatgaaatcctgaagaaactcagcctcaaatcgagcgaaggaggattcaagatcacgattctttggttgcccgaaaagatgcatccggtatgtgccaacaaattattgaaattgctcgaagagccacctgagaaaactatcttcctgctcgtatcggaagctccggaaatgattctgcctactattctgagccgtactcaacgcatgaacgtgcgaaaaatagacgaaccggccatcgaccgcgtattgcagtccaaatacggtatccagcctgccgacagcctttccattgcccatctggcaaacgggaactttatcaaagcactggaaactattcatctgaatgaagagaatcagctcttcttcgacttatttgtcagcctgatgcgattgtcctatcaacggaaaatcagggaaatgaagctctggagcgaacaggttgccggcatgggacgtgaacgccagaagaactttctggaatactgccagcgcatgatccgcgaaaactttatattcaatctccatcagcgtgatctgacatacatgacaatcaacgaacagaatttcgcctctcgctttgctcctttcgtcaacgaaaggaacgtaataggcatcatggatgaactaagcgaagcgcaactgcatatagaacaaaatgtaaatgccaagatggtattcttcgacttctctctgaagatgatcgtactgttgaagcaataataaatatataaactatggaatataagcttcataatgggagcggcggtctttgctgcaaaggatgctcccgacaagataagaaactgaacacttacgattggctggcagacataccaggcaacgcggaagagtgtgatatggtggaagtgcaatttaaaaacacccgaaaaggctattaccgcaacagcaacaagatcaaactggaaaagggagacatcgttgccgtagaagctgctccgggacatgacatcggcgtcgtaaccctgacgggaagactcgtcccgctgcaaatgaagaaggccaacttcaagactgatgttgaaataaagagaatctaccggaaagcaaaaccggtggatatggagaaattcaacgaagcgaaagcaaaggaacatgcgaccatgatccgtgcccgccagatcgcactgaacctgaacctggatatgaaaatcggtgatgtggaatatcagggcgacggcaataaggccatcttctactacattgctgacgaacgtgtggacttccgccaactgattaaggtacttgccgaagctttccgtgtccgtattgaaatgaaacaaatcggtgcacgacaggaagcaggacgtatcggaggtatcggtccttgcggacgggagctttgctgcgctacttggatgacgagctttgtatcggtatctacaagtgccgcccgctttcaggacatttcactgaatcctcaaaagcttgccggacagtgcgcaaagttaaagtgttgtctcaactatgaggtggactgctatgtggaagctcagaagcgcctcccttccaaagaaatcgaactggaaacaaaggacggcactttctacttcttcaaggctgatattctgagtaatcatgtttcttactctacggacaagaacttccccgccaatctggtaacaatcagtggaaaacgtgcctttgaggtaattgccatgaacaagaaaggaatgaaaccggatagtctgctcgaagctgaagtgaagcaagaatccaaaaagccgattgacttgctggaacaggaaagcctcacccgcttcgaccgtaaccgaaataataaggacggaaacaacggtaaccggaacaagaagaagagaaaaggaaataatgacaaccgcccgcaggcacaggccgaaggtggaaatcgtccgcagcaacctcagaggggggagaacgagaatcgtccccaaccgtcagagaacggcaacagaggagaaagaggagacagagaaaatcgtccgagaaacaataacaataataaccggaacagaggacagaatcaaggacggaataatgagaacagacgtccggaaagaggacagaatcaggaacgtccacagaatccgaaccgtccgcagaatcaagagcgtccgcagaatagagaacggcaactcaaacaggaacgtcctcaaaatcaggaacgcccgcaggaacaaggaagacaacccaaccaggaacgtattcccagacctgaaagaaattcgaatcaagagaaaccgcaaaataatgaaaagcctgctcaggaatagcttattttgtttattcggtgcctgcctcatggcagcctgtaatgaaaataccgtgtatcactcctaccagtccctgcccaatgagggatggggaaagagtgatacactctcttttcagtgtcctgttacggacagtattcctggtacactcagattatttgcggaagttcgcaacagaagtgaatacccttaccgcaacctttacttattcattcatgagaatctgctcgactccacagtatggcgcactgacacgatagcggtcaacctggctgattccacaggaagatggacaggcaatgggtggggaagtatctatcaaacagcagtttttatcaaatctgtccgcccgctgcatcccggaaactacacagttaagattgtgcacggaatgcaggatgagaagttaaccggactcaatgacgtcggtatccggattgaaaaacaagaagaatagattaaagccttctgcctcttccggcatccagcctcaggaagataaacaataaaatggtgaatccccacaaggaagaacctccgtaactgaagaacggcaaaggaataccaattaccggagtcagcccaagcaccatcccgacattaataaaaagatggaaaaggaaaatactgacaacggaatatccatagacacgtgcaaaagtggaagtctgccgctcggataaagcaatcagtctcagaatcaatataaggaaagccaacagaacagcagccgaaccgacaaatccctgctcctctcccactgtgcagaagataaagtcagtatcttgttcgggcacatatttcagtttcgtctgtgtgccattcagaaagccttttccggtcaatccaccggaaccgatggctatctttgactgattgacattatatcctgctcccgtcaggtcttcttccataccgagtacaaccttgatacggatttgctgatgggattccaaaatgttatcaaatacatagttactggaatacagaaagccgatagagccgatggcaaacagagcaatcaggaaataggaacgttgacgctctctcaatgccagatagaacagataacctatcacaaggacacaaagcccccattgcacccataccagactgaagtgtattccgtattccgatattaaatatgcgataagcagaatgatcaggcttcctccgataatgttccgtgtgggttcccactttttggggtacacccataccattcctccggcaaacaacagaatcaataacaacacgataaattcgcccaacggtgtgggagtatcggcaataaagacctcgtcaaaacggatgccgacaacaaagtaaatcactgcacacaaaccggcaaaaagcactacaccgggcattccttcccgataaagcaccaaaaagaaggcaagataaactaatgccgaccccgtctcccgctgtccgataatcaggagcatcggaagaagaatgataaagcccaagacgaaagcacatttttctttctttatgctgaatgagtatgagttcatatatttcgccaacgccagtgccgtagcaaacttggcaaactcggcgggttgcaggctgaccggtcccatcaccagccaagaacgcgatcctttcgtatccggtgcgataaagatggtaacaataagcagcacaatcatccctacatatataatgtacgcgaacatatcatacatccggtcttccagcatcagcaaaacaaatcccaaaccaaaggagcagataatccatacaaactgctttccggcacgggtagagaaatcaaagaagtcacgatcgccatagtcatagctggcaccgcaaacgctgaaccatccgccgacaatcaaaagcagatagataccaatcgttacccaatccagtgttttccacaaactatcgttcctcgttaccatataagatgattctgttactgatttcttctgctcttaactcattctcgggcgacaacttccctttcatatattgttccatcatcaatgcaccgatcggcactccataagtcgctccccaacctccattctctacatatacggcaatggcgatcttaggctggttcatcggagcaaagcccataaacaccgaatggtcatgtccgcgattctgcgctgttcctgtctttccgcaggcttcaagttccggcaccatcacggacagcatacggcaagtacctccggtggcagcagcacgcattccttctaccacagattcataatgtcttcgctctatggttgtgttgcgtggatgtcgataaatgctatccaactgcgcatcctgaatttccttcacaatatgtggtgttgtaaaatgtccgcgattggcaatcgttgcccctaagttagctatctgaagaggggtagacagaatttcaccttgtccgatggagatactgatgaccgtcagtccgttccagtgtccacgataagccttgtcataaaattgcgcgttcggtatcaagccccgtttctctccgggcaaatcaactcctaacttatagccgaatccctgagaaaccatgtgatctttccaaactgtgatggcattctgcggtgaaccgtacttgcgatcgccgaacatacggaacagcccccaacagaaataggagttgcaagaagtcgcaatagccggaatcaatggcaaaggtgagccgtgagcatgacatcccactgtcagacgcccataatggaaaccacgagaacaggggaaagaaggactttgctcggtaatgattccttcttgcaggaaggtcagtccctgtgccgtcttgaaagttgaccccggaggatagactcccatcaacgcacgattgagcaacggtttctgtttatcgcgttgcagcatcagatggttcttgccacgctgacgaccaatcatcagatgcggatcataattcggagaagaaaccagacaaaggatttctccggtttccggttcgatagctacgatacttccaatcttatttttcaataaccgttcgcctaatatctgcaaatcgatgtcgagactcagagtcagattcttgcccggaatggaaggacggtcatactctccgtccatataacgtccctggatacgtccatgcgcatcgcgcaacagaatctctactcccttttctccacgcaggtatttctcgtacgatctttcaactcccagttttcctacataatctccgcgaatgtagtatccctcttcatccgcctccatatctttaacggatacctcaccgatatcccccaaagcatgggcggcagcattgtatgaatattgccggatcgtacgccgctgaatataaaaaccgggaaacttgaacagtttctcctggaagacaccgcactcctccgcagagagttgtgacatgaacagctggttggtatatcgggaatatcccggattgcggcggcggtctctcatatcactcatgatcttaaggaactgagcacgagtaatgcccaacgactcacataaatcgagtgtatccagattttcgacctctttcgggacaagagtgatgtcataggccggctggttgaataccagcagtttgccgttacggtcgtaaatagccccccgtgagggatattgaattttattcaggaaagcattgctgtcggcattcttcttgtagtcgtctgtcgttatctgtaatacaaagaggcgtatcagataaatcaacacaatagttaaagcaatccccccgataacaaatttccgcttttctaatctatagtcttttgccattcctatctccttattccttctacagcaagaatgcaggttaaagtcagaagggtgcacgaaatcacccgcaataacaacagccagatgctggtaaatgagaagaactcaatgctgagtaatgccagactatggacaaaaacacttgccgtggtatatttcaggaaaggagtgatgcccatgctcttgaaagaagggatgatactgtccagattgtcacgcggagtaaacaggcgcagcaaggacggacgaaggaaagccagcagcacggttgccgcagcattcatccccggagtatcggcaaagatatcaatggttagtccgaagaagaaagcccacaacatcaactcattccgggaagttccggaagcgaatttcaggataaagtaaatgtagagaaagggagtagcatatccggcaatatgtacgttattcaggatcagcacctgaagaagtaccagcccgataaaccatccgattctatgtatataggtaattatcattatttcacagccttattttccagttctttctgttcctgctgaccgttccgggctatcacccgcacatcactcaccttgccgaaatcggtagccaacttgattttcaacaaataagacaatccgtcgtgcgagtcggacatatcatcgactgttcctaccatgattccttcagggaatacggtagagaagccgcttgtcaccaccgtatcacccagattaaactctgcatgacgaggcaaatctttcagatacgcatagcgggaatctccatgctcccacttcagataaccaaagtagtcacttccgacaatcttgcaactaatatttgacttgctgttcaataccgaaatcacgagtgaatacgaagaggaggtttcatagacaatgcccactattccgtttccgtccaccactcccatttcgggacggatgccggaagaagaaccctgatcgagcgttatataattatccgcctgattcagactgttcttaatgacgtgtgccttgaacaactgataatctgtcagaggtatctccctgatgctgtttacagtgaccgaatcaacctgatgctcccgcaacgccttttccagattagtgatctgctgttcgagcgccatattacgatccagcaagtctgcgttgaccgatttgagatggaaataagagcttattcctcccgaaacttcataaactgcccccacaacgacattggcagatgtaaaaaaagtactctgctgatagttgttgaaccgaaataacaaaacaaaactggctacctctaatacgatgaagaggaaccagtaattgtatttcaaaaggaagtttattaaattccgcatgaataatgatccgtattatttatctcatcaagaaagagaaacggtctacattctttaatgccacacccgtacctttggctactgcgtgcaaaggatcttcagcaatgtggaaaggtatgttaatcttatctgtcaaacgcttgtccagtccgcgaagcaatgcaccaccaccggcaagatagataccgttgtgtacaatatccgcatacagttcgggcggcgtattttccaatgcactcaggatggctgtttcaaccttggagatggatttctccagacagtgagccacttcctgataacatacgggcacttccatcggaagagctgtgatacggttcggtccatgaacgatgtaatcttccggagcgtcatcgccaagctcggtcagtgcagcacccacgttgatcttaatacgttctgccatacgttcgctgactttcacattatgctgacggctcatgtactcctggatatccgcagtcagatcatcaccggcgatacggatagagttgttggaaacgatacctcccaaagagataacggcaatttccgtagacccaccacctatatccacgatcatgtttccttcgggcgcttctacatcaataccgataccgattgccgcagccatcggttcgaatatcagatagacgtcacgcccaccggcatgctcggccgagtcacgaacggcacggagttctacttccgtacttcccgacggcacaccgatcaccatacgaagtgacggcgaaaacaagtgattacgagtatttacctgcttaatcaaaccgcgcatcatttgctcgcaagcatagaagtcggcgatcactccatccctcaacggacgaatagtacgtatattttcgtgggtcttttcgtgcatcaacttcgccttttccccaacggcgatcatcttatctgtacggcgatccaaggccacaaccgaaggctcatccaccacaattttcccgtttgtgatgatgatggtattggctgtccccaagtccatcgctatttcttgtgtaaaagagaataatcccattaatataaagtattaagtattaggtattaaatattaggtataaagtagactgccttatccgcaaggttaatacttaatacctaatactcaatacctgtttttaatgtttaaaatgacggataccggtggtcaccatcgccataccgtgctcgttgcagtaagcaaaagtaagatcgtctttcaccgagccgcccggctggatgactgccgtaataccttctttgtctgctatttctacgcaatccgggaaggggaagaaagcatctgaagccattaccgcaccgttcagatcgaatccgaatgatttggctttttcaatcgcttgtttcaaggcgtctacccgtgaagtctgtcccacaccgcttgcaagaagctgtttgccttttgccagcacgatagcgtttgatttactgttcttaacgatcttgttggcaaacaacagatcttccacttcttccggagtaggagctttgtctgtcacagttctcagatcggcaaccgtttcaatattcatatctttgtcctgcaccaatacaccgttcaacaaagcacggaactgtttcttaggcagtttggcttctttgcgaaccaggatgatgcggttctttttctgtcccaaaatctcgagcgcgtctacgtcatagtccggcgcgataatcacttcgaagaatatcttgttgatctcttcagctgctgctttgtcaatcactccgttagtaatcaatacgcctccgaaagcggaaacgggatcaccggccaacgcgtctgtccatgcttccagtacagtcggacgagaagccaggccgcaagcattattatgtttcaggatagcgaaagtcaaatcttcgtattcgtcgatcagatcgacggcagcattgatgtccagcaagttgttataagagatttccttaccgtgaatctgatcgaacatggcgtccagatttccgtagaaataacctttctgatgagggttttcaccgtaacggagttgcttctggttgtttaccgaacaacggaaagcagaaccttcgccggcatcgaaataattgaagatagctgagtcgtagtgagaagaaacggcaaacgcttcttttgccatccagcgacgttcttcgagtgaagaagtagcgccatgttccatcagcatatccagcaatggcttatattgtgcctgagaagccacgatgatgacatcgttatagttcttggcagcagcacgaatcaaagagattccacctatatcgattttttcaatgatgtctgcttcggatgcgccggaagctacggtagcttcaaacggatacaggtcgacaataaccaaatctatttcggggatttcatacttttcaatctgttgaatatcctgttccaggtcacgacggcaaaggatacctccgaaaatcttcggatgtaatgtcttcactctaccaccaaggatggaaggataagtggtcaaatcttccactgccttacagggatatcctagtgattcaataaactgacgagttccacctgttgagagaaactcgactccttcttcgtaaagtttggtaataatttcatccaaaccttccttatggtatacagataccaatgcagtttttattcttttagactctgacattgaattgcttattaagtatttgatgcgcaaagttacgaaatattgtttatcgtacgtaataaataaggtgtgaattaataaaaaaaagcgttgactgttcctgttggaaagtcaacgctccttcgcacatagagcttctaatcaaaatatattaccagatagacactcgtttatccttcgctacgaacataggatcatgttctgtgatattgaatgcttcgtaccagttctggatatgaggcaatgctccgtccacacgccattttcctaaagagtgaggatcgagtttggtcagtcggagaatctcttccgggcggatgtgtccggcccatacattagcataagcaaggaagaaacgttgttcgggagtaaatccgtcaacaacttccagcggtgctgtttccattgctttcttgaaagccgcgaaagaaacctgcaagccaccgtggtcggcaatgttctctcccaaagtcagctcaccgttaccatgtacaccgggagccacctctatgctgtcaaagaagttaaccattacctgagcacgttcttcgaactttttagcatcttcttctgtccaccagtctttcaagttaccatccttgtcgtattgacggccctgatcgtcgaatccgtgagtcatttcatggccgattaccacaccgatagcaccatagttcatcgcatcgtcagcgttcatatcgaagaacggagcctgcaggatagcggctgggaaacagatttcgttggttgtcgggttatagtaagcatttactgtctgaggtgtcatcaaccattcgtccttgtcgaccggcttaccggctttcgcgatcatgtcattgaagtcccattggctggcacgctcgatatttgcccaataagagtcgtctttgatctccagagcagagtaatctttccatttatccgggtaaccgatctttacatggaaagtagccagtttctctaatgctttcacctttgtcggttcgctcatccattccagcgctttgatgcgttcgcccagagaagtctgcaaattcttcaccaatccaaccatacgttctttggcagcggcagggaagtatttctcgacatacatctgtcctactacttcacccaaagagccgtctacagtgcttaccgcacgtttccagcgaggctgcatttctttcttgccagacattgttctactatagaagtcgaagttttgtgctacgaaatcatcactaaggaaagaggctgcggcatcgatcagattccattgaagatagaacttctggtcttcaagaggcactgtattaataacatcggcaacttccttcatggctgcaggctgaccgatattcacttctttcaagtcattcagtcccgaagtagtgaaataagcatcccagttgaaagtagggaagttctttttcagcgtttccatgtccatcttattatagttggcatgcggatcacgcaattctacttgtgaacgggcagctttggcaagacgtgtttcgatgttcatcacagccaccattgctttctgtgcggtagcttcgtcatagccagccaactggaacattttaacgaggtgttccttatatttatcgcggatactctttgtctgctcgtcattctccagatagtagtcacgctgtcccattccgagaccgccctgataggtctgaaccatgttcatagagctgttcatatcatccgcactaacaaacatagtaaagtaaggacgtattcctttcttctgactttcggcaatgtaggtgtaaatctcttctttatctttgagcgcatcgatagccgccatttcttctttgatcggagctgctccttctttgttcagcttcacgctgtccatagcgatgttataaagatcacccactttctgggcagcactgcccggagcgttgtctttctttgcagccagttctgcaatcagttctttcaactgttcgcggcttttctcgtgaagcatatcgaaagagccgaagcgtgaatactcgtctgtcagcggatgactttcaatccacccaccgcaggcatactgataaaaacttgtacccggcattgccgtggtatccagattagcaaggtcgataccggacgttagtacggcctctttcttgctattacatcctgttgtcataaggcatacggcaagaattggtaaatacttggttactttcatattatataataaattagtttttcacttcttccagttccatcgaaacccgttcccactcttcaacggtggtatccaattgctgtttcagcttctgatgccgttcatacagttgcatatccgatgctccttccggggttgccatctttgcttccagaatggcgattgccgattccgtttcttcaatcgaagcctcacagtccgccacctggcgttccaacttctttatcttcttattgagttccttctgcgcttcatacgagagtctgttctccgaaggttgctctgtatccgcttcgtttcctttggcagatgtggtaggagaagtagagagagaaactcctttctgaagttcattcaggctgtcgatcttcttcttttgcaggaaatcgtaaataccgccaagatgttctttcactgttccaccaccgaactcatatactttagtcgcaagtccgtccaaaaaatcacggtcgtggctgacaagtatcactgttccgtcaaattcgcggatagcttctttcagtacatctttggaacgcatatccagatgattggtaggttcgtccaaaatcaggaagctcaccggttccagcagcaacttaatcatagccagacgagtacgctctccaccggaaagtactttcacttttttatccgaagcctctccgccaaacatgaatgcacccaaaatgtcacgtatcttcaaccggatatctcctgtcgccacacggtcgatcgtatcaaataccgtcatgttttcatccagcatctgcgcctgattctgtgcaaagtaaccgatctgcacgttatgcccgatcgtcagtttaccatcaaaatcaatctcgcccatgatacatttcactaacgtagatttaccttctccgttctttccgacaaatgcgactttttctcctctgttgatcgtcagattcacatcatggaaaacaacgtgctgtccgtatgccttgcgtacgtcttcacagataaccggataattcccgctgcggctggcaggaggaaatttcagacggagggaagagttgtcttcctcatcgacctcgatacggtctatcttttccagttgtttgatacgactctgcacctgtacggccttggttgccttatagcggaaacgttcgataaagtcttccgtatcctgtatctgcttctgctgattctcataggcacggagctgctgctcacgacgttctttacgtaatacgacaaactcatcgtacttcactttatagtcataaatctgaccgcaggtaatctcgatcgtacgggtagttacattattaaggaaagcacggtcgtggctgaccagcacaacagcattggcacgggtagacaggaagttctccagccattgtatactctcgatatccagatggttagtcggctcatcaaggagcagcacatccggacgacgaagcaagagcttcgctagttcgatacgcatacgccagccgccggagaattcggaagtcgaacggttaaagtcttccctgctaaagcccaatcccaacagggtacgttctatttccgcctgaaaattggttccacccatcatcaggaaacggtcgttttcgtgtgtgaagcggtctatcaactggtggtattcttcggattcatagtcggtgcggtcggcaagctgctgattcatccgttcaaggtttgcctgaagttcgaaaatatgctcgaaagcgagttctgcttcctccatcaccgtgcggacatccgaaaggatcatgacttgcggcaggtagccgatcgttacatctttagggacggctaccactccgcgggtcggtgtttgcagacctgccaatattttcagcatagtcgatttgcccgcaccattcttgccgaccaaagcgatgcggtcttttttattgatcacatagctgacatccgcaaagagcggtgtcacattaaattctactgataatccttctactgaaatcacttctgtctctgatttataagattttggattgcaaagataatgaataattattggataaagggcagtattatccgttatgaaagacaaaaaaagcagtcattcataagaatgactgcttcctgatctttatcaaaagcttttctttagaacaatttagcagggtattcaccggcatctaccaatgcctgaatcttgtccactacgctctgacggtcttccggataagttaccccaaaccatttgctggtagtatccagaacttccacagttgcagttccgtcgttaatcaatttatccaccatcagcgggataaagaattcgctcttcaggttctccatgttcttcggatcgctcaggaaagtcttgaagaactcttcgctgtaagcaaaatagtcaggagtaaaaccccagaagttcatactaaccggagtcgtatcaggagtagctgtccattcaccgttatcatcgatgtattttacttcaccgtccagacgttgaatcttcgtacgttccactacggaagtcagcaagttgttagcatctgtactgcagataccacgagataccgtaccgctctcgctcaacgtatttcccacacggaaacctaccattgaataaacattcttggaattttcgggaagagcagacaggaatttgcccattacctggaacgagtcacgaccatagaagtcatcgcagttgattaccgcaaacggttcactaatcacatcagctcccatcattaccgcatgatttgtaccccatggtttggtacggtctgccggacaagtgaagccttccggaagatcatcgatagactgaaataccagttcgcaaggaatgtggccttcgtatttagaaataatcttttcgcggaaatcctgttcaaaatctttgcggattacaaatacaagcttaccaaatcctgcgttgatagcatcatagatagagtaatccataatagtttcgccgttaggacccagtccgtccaattgcttcaagcctccataacggctacccataccagcagccaataagaataaagttggtttcataaattgtgtaatattaaaaggttagtgatgtcaatggcatcagatttcgttgcaaatttacaaaaatagttgaatccaacaggacaaatatcaatcattattcactaaaatcgtacaaaaatcattcattagaacgggtaaccgatagcaaaatgtattcccagattcttaaagaaagctccggttacattataatagccgctacgatccgtatcataaggcagatgcagaggaataccgaagtcgagacggaatacgagaatatccatatcataacggataccgacaccggttcccaaagctatttgtttagggaaagtcttcagacgcagttgtgaatcgggacgtgcttcttttccatcagccaaaagctttctgtctttgcgcaacaaccacacatttcctgcatccagaaaggtagctccccaaaagctcttgaaaatacggaaacgatattccacattcgcctcaaagcggaaggttcctgtctgatccagataggaatattttccctcttccggatgataaccgcccggaccgacgctgcgcactgtaaaagcgcggatactattggcaccacctacataaaattgttcactatagggagctatcgtagcgttgccataagtaaacagtgcacctactgccacccgactggctatcgcattattcttatctatgttccacaaatgacgcaactccgtattcaacttcacaaactgtgcaaacggagcacctaataaacttttatcttcttcattgaacggcttgccaaaagcacggtaaataagggaagtgatattacccgccgaagtgacggtagactgccaccagatagggttctttatcctgcgaaccgaagcattgtcatacgtatatgtatattccatcgccggaataaactgattcctaagactgacatacagtgcaggattagcttcagctatctctttaaattccgcagactgatgctgcaagacattaaatgtcagtttaaaaggagtaatactatgccggctggtacgggagggctggaaatcgtatgtagcattgccgccaaaggataacagtttgtaatactttgcccggttcagctggttgatatacagacggaacgtcgtcgtggcagggaagtcaaactcccgtttacccagatgcgggaacacgactctcgggaaagtcagagaggtagaaagccccatttcccaactgttcatcagtgaactcttctcaccgcctccggtctgccattcataagagcctttcagttttacgttccagctttcaccacctccgaatacattgttacgggtgacaccgaaagatgcaccgggaccggtctggtcattactcttcgttactacattcagttccagttccgcatccagcggtttggcaaatgtagcctgcatggtgacatccagtgtatcacaagccgctgtcgtatctcggggagcatattgcatatccatatagctgaatataccgagctgactcaatttttcctgcacctgctcctgccggtactggctataaaggcgggtacggttggaagccctcatctgtttgctccgtacaaactgctgatagttcatccatcgatagagcatattcggacggacctgcaatttatcataatagtggatattcagattcttgtacaagatactgtcattaggtgcctcgccattctttccgaagagatagaccgaagcatctcctacatagtaagaacgttgagcggcagccggtaatcccggaagaggaatcagacgaagactgatatgtccgccgggaaccaaggttgtatccgcctgataggtcatataatccggacggaagtagaaatatccccgattacgcaaaagggtactgatacgggaacgttcttcatccaaatccaccacattaaactgttcgccaggggtgatataagacatacggcgtccgcgttccatgatcttcagagtctggggagtgaaacgctgataatacacagtatctatgaaataaggattcttcatatctaccgtatagagcagacttgctttcagactatctttcttatcgaccaaggtctcgtaagtcacctttccattgaaatatccgtaatcacggagcaggttagtggccaccttgacacgtacttcgggattgacagtggaaataaatacaggcggattggcggcaaagcggttaaacatccacttaccgaatcctttcttgtatttcacgaagtcgttatacatccacattttaaaaggaataggcagaaaacctcctaacagggtagtactgggagttttggcaagcgccgcattgatttccgtcaaagcagtttcaccaacccgtgtcgatgatttattgacaatcaccgtttttcctccggtatagagtatttcatcttcgggcagatgtttcgtcaccgaacacgccgagaacaacactatacctataagacagcctgctaatatgttaatacgtatatctttcattcttacttctttttcttaaagatgaacagttcactgagtttatccagtttcttgcgaagtaccagaccgactccggtttccgtaatctccccttcgagtacactctcgtagttcttgtcgtagaacaaacggacataacgggttcccgtacggtccagacgatattccagagagatgttgtcaatgaaggattcggcatcattcgtcgcattctcgcccgtagataccttaccgccgattacaatctggaagcggttgttgaagaggcgctgcgaataacggaaactgtaatccgtacgcttgccgccggtatccgaggcgtcatgatcttcgacacccacagagacgctggcattcttcaggttacccatcagtgaatttatctgactgctcagtacggagttcagggcagaacccatattcagcttgccaagtccgccgcctccaccgccgatcggtccggtgccgagataggttttcatcaacatgatataaagtgcctgttttccacgttcttccgctcccattgctgtcagttcattctgtatggtcgcatcttccggggccgctacgtcgaaagcaaaagacaggttgtccaaccggttctttacgacaatggaaacgtcaaagttaaccattctcgttcctccgttctctccttcggatacggaagcacggatacggtcagttgccttgaagttcagcatggggtccatcgggtttccggtccaatctacatagctgccgttatcgatggcaaattccttgactgcaatgataggcagagaatacttcatcagtccaccgctcagtgtgtaacgtccggtcaatgtcaggtctccctgcggagtgtatttcatcgaaagatcgccacctccttccagttcgatacgattgtcactggcgtccaagtccactttcaccctgactgaagggtcgatatgaaccatcatcagcatatccaatccacctaaagatacggtaggcacttcctgacggacaactgtggtggtatcactgaatgaagtaaatgtcaccagacttcccagacgatcctgcacggtcagcggtgaatcggtcagtacatacgagacatccgtattgcccagcaaattcaggtttccacgcatattcaacccgtccaacgggccttttatggttgcccgcaagtccgcaaagacttttccgtagacaaggctttcgcgagtacgcttcgcattcaacaaggtatagttttccgccagcagattcagactcgccatcggtcgggacatatcacggaaatcgacataaccgtcgatcgtaaacggattctttcccgtggtgtaaatggcgaacttatcaaatatcagacgattgttcttcaactgcacagggcggttatcaaacaggaagttagcaccatactggcgtgacaggacagatacgctgtccagtatcagttcaccgtttatcaatggctgctcggtactgcctgttatattcaggtcaccgtccatatcaccggcaagcgtaaccagctcgtcgggaataaaggcgttggcaatacgaagcgggaagtgttccaacgtcgtatttacttccaggctatcctttcccgtcgaggtagggagcagcttgccatctgctatcagcacttctaccttatcatgattcagataagcgttgaggtattgttttccctgttcgcccggcagccatgtagcccccaacgtaatgtcaccaatgcgctggcgttcataagtcagttcatcaatggatgcttccgcagagagctgaaggtccttttcggtctgtatatagtgtgcttctgccgagaacaatccggtgatttcggggaagtaaggcagtacgctcgttatttcatccaagcggattctccggatttcgacatcgatattctgcaaagaaaccgtatctccctgtaccgaatgcacacggaagcccataccttcatcatcccacatatccacattggcatacacgcgcatattcttatgcagataaatccagttatgatcttcgttgaagtggaatttacggaacgcaataatcggttcttccggaatcagtgtaaaagccagtccatccccttttccacgtcctccaaccagcggacgggcattgactccaagcaacacaccggttttccccttttcgttcttatattctgccagcagctcggcatcgcggtcgcgaatctcgcctgtcagaatagtggagaaggaaaactggggattcttcggtccgttgattactccggcacggaggttcatacgggtagtatcttgtttgaccgtgaaaaagaccgtatccagttgcaaggtatccactttcaaagcatggatggctgcttttccgttgattccccaatcgggagcagtgccgaatttcatggaagcatcatggaacgatatattcttcattgccatatagtatgccaacggattctcctttcctgccgagaaagagaaaatggccgatggcaatgcttcacgcaaagcagcatgatccaagagtttttcatccacctgcttcatcaacacatctacaaaatgggtagactgacgaatcagaggatatacaccggcacgggcactcagattcagtttcatatcaccggcggtgaaatgagtgaaaacacggttctgccgtgcctctccgcttaaattgaacgccaacggacgcttcatcggcttgggcataagtcccagttcgtacaaatcaagctgagtaacgtcaactgtcactttaccgtccggataactatgagctaaattatattctgcatccgccgtcattttcaaaagttcattgtcactcgtaagctgagccgttgccaaagctcctttaagatttcccgtcaaatgaacattcgaaagatgatagcgggcgtaatgaagctggtccaaagaaagattcagattggctaaagaatggaaggacatgacatccagtcccctgcccttggcatctgccgaaagagacagttcataaatcgagtctttcgggagaaaatgatgtagttgcagatcgtttattttcagatcggccgtataaacttctgtcgaactgtttaatgcggcatttacattcatgctgcccttgccttctttcagatcgagttttgctttatactgcgggccgttcatctccatcttcatcttgagactcatactgtcgggaattactaaagagccatcgggtgtgactccagtcaatcctgtcaggaagttcagattccgagtaaccatatccagcccaatagttcccgaacgagtcagactgtccgtcaggttttcaaggattcctcccccctttagcgagaaagctcccggcaagtctaccgtgaagcgcgaaatctgcatctctttcagatttccatctgtaccggcacgaatcactaacggacggaacggatatgcttctttaaacgtttgaggcagtccgccggcaaaaagcatcacgtcctctttgcctatatgtgcgttaaagctggcggataaacgtcctgtcgtcgggatatttacgagttcccaataagtctgggcggacaggtctatttctgaatgtggagtttgcagtttcagttcaggaatgcggatgatagaatcattcgaaaagagccgccctgtcagtgaagtaatactcagtcccgaacgctcttccatcgttatttcacgaatcacagcgttcatatttctgccttcgtagagcagagagtccaatccgatgcggatattccggactgccatatgagaggcgtcaaaaccttccgacggttgggcctctccggtgtcataactggcagaggcacccgacaaaaggaattgcttcaatccataaaactggttctttaaatccgctttggcgtcatcaatggtcgcttcgcctatgtatgccgccatcttcatggagtcggcaggcagtttcataccgaatgatacattcttcaacttcagttgatgaaggttcaccttccagttcacaggagcagatgccgtcgtatctttgggagtggtcgtggtatcagtcatcagaagttgtatatgagtatcggataactctgtccgattgacaactgccgtttcgttcgataaatcgactccatgactttgcagaaagaagcgtcccaaaacgccttttatctgcatcccctctatcagattggcagaattgaccgccacctgacttaaggtaacctcgtcaacttctacttttcctttgagcaatggccatgcctgtacgcggacattcaggctttccaaagacaataaggtatccggctgctgtatgacttccacccctcgtaccagcagattaagcggaaaacgaaggtctatccgttccacctgaatctgcattccggttgctttagaagcatacgcagtaacctcccgtcgcaaaagattctgaacaggaggtatataaagtaataccatcagtattacaaaaagtattataggagtaagcaatatccagcccacccgtcttatccattttcgtttcatgcaggatgtgtcagtgtaaaagtgatacaaagtaaacaaattactttgaaaaaaggtttgtccaaaagctaaaatgtgaaaaagccggaggttatggttgcatttagcgcaatttcatcccgttcattccgttcattcggaaggtgagatatttgtcaaggcagcaccttctcactatgctacgagcttatgcccgtgccactacgttggcacgcttgtgccaccgcagtggcacgactgtgacatgcctttggcacaactgtgccaacaaggtggcacaagcatggcactatataggctgttccaaaggagctgccgggagagatttaatgtaaaccgaaactatactcctcagcagcacgaacaactttacgcaccgcctccaaagtctccaacgtagtcttttctatttcttcggagaattcttccccccggcaagactccagccatcttaatgaagcaacagactcagaagctccgatcaaggtgaaaagcggaaggagtttatgagccatagcggctattccatccacctccctgtcagttaatgcctgttgcatccggtcggcattcttaccggtctcttcgataaaagtccggataatagaacacgccgcttccggatcatcttccgagaaggcagtcagtgcagaaaagttgaataaagtatcttcaggcagcgcatctgcaatcaattgcatatcatgtgttatatgcgcctcatcagctgacatctgtccttcattcagagttaccagcaattctttcaccgtaaaaggtttgtgcaggcatccggcaaagccatgttcatgcaaagccttctcatccatttcgctgcgtgccgtgacagcaataacaggaatattgcgggcttgcggaatgttagaggcacgcaataatttgaccagatcaaaaccgttgatagcaggcatctgtatatcggtcagcagcacatcaaacgtcgaggagcgcagttgctctatcagctcttccaactgctcgcagcaaacagcatcgatgttgtgctgtttcagcatggcagcagtcaggttcagctgaatcttatcatcatcaatcagaagcacacggatcaccttcatgaccggtacagcatctgtctcttccggagaaacatctgtttcttccggagaagcatccgtatctttcgacgctttcttgattctgcttccaaaaggtttattttccactattgacttacccaccggaaagagtggcaacacgacagtaaagcaacttccttttcctaacgtgctttgtacatcgatcgtaccttcaagcagaagaaccaacttatgcacaatggacaatcccagtccgaatccttcttctccctgcgcaccggggaggcgggtaaattcctggaagatgcgttcccggtcttccgatgccatccctttgccggtatcctcaaccgctattgtcagcttcgaagcgttataaccaacagttaatgtgatcttgccctgctgagtgaatttcaccgcattggacaagagattattcactatctgctgaatacgtaaaggatcactgatatatttctccgacaattccggagcgatatgacattgcaagaccaagcctttagccgccgtcagaggttcaaagcaaacacggatttcttcaaacagctgagcaggattaaaaacaatccggttcacttccgctttattgaggtcaagacggtggaaatcaagcaaatcgcttactaacttcagtaaatgctctgaagaacttttcatgttgtccagatagaatcgctgccgttcatcttcggtcaggcgggacaagagttccgtatatcccattatcgagcctaatggcgccttaaagtcatgggtaatggcaagcatcagtttctcacgggcaacaagcaagtcttccgcccgcttattcgcttcttcgagctgacgccgataacggttgctacgagtaatatcccgcataattaagatcaggaaaaaggcggataagaatacggcaccaatggcaattccggcaatgatattagccgaacgcatccgcacctcttgctgaagttccgcatcctgacgggcacgcgcagacatttcctcctcgtatccttttatcagactatccattcttgcggtcagctgtgtattcatccgctgatacctcgtactggtacgccggatcgttcgcctccgctgcaaccgtttctcttcggtagccatgcgaatcttatgctgaagggagtccgccgacttgacaggttccaatatcgtatcggtggcaatttccagagaagtattgaccagcacggcagtatctttcttagaaggcgcgaacacttcccccaatcgtttgaagaagcctttcttcttcggggtagtgatcagagaatcgcgtttggtaataacccggtgttgtacccgttgctgagtaatcaccgagtcctgctgttctgatatgatttcttcaatctccgaggcggaaagcaagctatcattcgcctcgctcagcacccgcagcatctgaagggtattctgatctttctcatggagaagactcagcagactgtctgtccgcagattctgctgatcgtccgcagccgacagcgtctccatctcctgatgcacaaacaccagagaaaaaagaagaatcgccagcagcaatatatagccgatggttattttcagtttggtggagcgaaaggaagccataggcaattaagattttaaattatgaattttgaatggaaggcggtagtttcgtcttgtgatggaaacgccaccataacatcagaccggcactggtcaacccaaaaggaaatgccatccagacacctatgatcccccactccaacacgaatccgcaaaaatagccgaccggaagcgaaataaggaaataagcaatgaaggcaatcagcatcatcagttttacatctgagattccacgcaaggcattggcaaaggttatctgcaatccatctccaaactgatatacaaggaacggaaggataagcgaagttaccatagccgccacttcggtactatcggtaaaccagcctcccagataattgcggcagaggaatacgatggaagaaagcacaacacccaacgccatcatcaaatgaaaaccggcataagccgaacgacgtacattgagtatatcgccctgcccgttaaagttactcacacggacagccacagctgctcccatcccgtaatacatcataaacgtaaactgagaaatagccagcatgacctgatgagaagccagcgcaatggtacccagccagccaatcatcaccgcactcagactgaacgaagctgtctccattcccatctgaaaagcaatcggccaacccagcgaattcaatcgtccgaatatagccttcgaccatcccagacgatagaagccgagcttaaaacgaagaaaacgcggactccgcataaagactatgataaatacgactaccatcatgatacgcgagaacagcgtactgatacctgcccccagcaagcccatttccggcaagcccagctttccgtatatcaggatataattgccgataatattcagcacatttccgccgagcaatatccacatagcggtcttagtatccgtaattccatccgtaaactgcttgaagccattgaacagcatcacaaagacgagcgaagccagcagaaccagataataaggttttatcaggggaataagttcttccggctgtcccagatttcccacattaaaataaaggacagtcataccgatggtaagcaagaatgccaccaacaaatttgccagcaggctgttacgcaacgcctgccccgccgaagcatactgatgagttccatacaaacctcccacgataggagtcagcccgtacgagaagcctgtactgaaaataatcaccagattgaatacattattgacgaaggaagcagcacccagttctatcgtactatgatgaccgatcatcaacgtatcggcaaaccccagcacaataactcctatttgcccgattacaatgggcaatccgagagaaatcagtgctttgtaatgctccttatatatactatagatatttctcatttatttttccgtagttaatcgcatattccggcaactccgcatcctgccgttgcctccaataaatatcccgccggtaaggagaagtcaggatatttgtttcttataataaagtatcactccattctccttcctgaaagcagactgagctaccttttgcaattgtccggcagtaacagcgcgataacgctctacctccttttccatatcttccgccctgcccaacagttcaaaccaagcaagattggtagcgacattcaaataattgatattgccgaatatctgcgtcgattcgaatttattcttcactttttccagttcctgttcgtcaacaggttcttgctgcaaacgttccagttcttcacgtacggccgcttccgcctgttccagcgaaacacctgccgcgggtttgcccgagatatggaacaatccggcatccacactaccggaaatataagcgtcgatactcgaaaacagttgtttttgctgtaccaggcgttgattcagacgactggaacgtccgttgctcaacaaatccgacaatatatcaaaagcgtaataatccggatgatcatgactgcacatatgatacgccatgaatagtgaatcaaggggtacgttacgctctactgtcaatcgtcgttcttctgtctgctccggttcctgcggcagattccgttgaggaacctccctgcgagggatgggaccgaaccatttttccgtcaatgcgactgcttcctcaaaagagatatttcccgttacggcgagcactgcattgttcggcgcataaaaacggaagaagaatgctttcacctcttccagcgtcgcattggctatgtgcgacaaatcttttccgatggtaggccactgataagtatgcgcccgatatgccaaaggacgcaaaagatgaccgacgtctccgtaaggctggttcaggcaacgctgcttgaattcttccattactactccacgctgtacttccagactccattcactgaaatcaaggctcagcatacggtcggattccagccaaaagccggtctctacattctgccggggtacagtgaggtagtaattggttatgtcattattggtccaggcattattctcgccgcctgccagttgcagcggcatatcataatcgggaatgttcaccgaacctccgaacatcaggtgttcgaacaaatgagcaaagcctgtatgctcgggatgttcgtcgcgggctcccacattatataatacattaagagctaccatctgcgtactttcgtcctgcgaatgtaccagacgtaacccattgtccaaaatatgcctgttaatcttcattctacttaatccagtacttctacttttacaatcttcacgtcctcttcggggcggtcgctacgatcggttttcacctgctgaatcttatccacgatgtccatgccttcgattacttcaccgaaaaccgtatactcaccgtccagatgaggagtacctcctacagtcgtataagcttcgatctgttccggcgtaaagtgaaattccggttgcttggcagcttccgcttccgcctctgcaaaaagcttctcctgcaattcatacaaaccgttttcatcgttttccttccgcatcttatagatttctttcatgtgcttctgagccaacgtattgaaaataacattgatcttattctcattcatctggctttccatgcccagcaatgtagagtcgttgtacactttgcctgtcacaatgtagaactggcaaccggatgattcttttttcggatttacattgtctccctgacgggcagccgacaaagcgccttttttgtgaaaatacttcggataaacaaattcggccggaagggtgtaacccacatctcctgcacccagcatctttcctttcggtgcattctttgaatccgggtcacctgcctgaatcataaagtctttgataacacggtggaacagcgttccttcataaacgccgtcttccgccagcttaatgaaattatcacgatgtttcggcgtctcattatacaacttaaccttgatgtctcccaaggtcgtttcaatctttaccaacgtttcgttgtccatatttcctcctttttttgttccggttttgcaggccgtaagtccgcaaaacgatatggttaatagtaagtatgcaatctttttcataacacttttatttaatttaagtttgcaaatatactactttcgcccaaatcctcttacctttgtagcattaaaagaggcaaaagagagtatgatgaaatccatattgataatagaagacgatatcactttcggaatgatgctgaaaacctggctaagtaaaaaagggtttgaagtgtcgtcagtcagtaacattgcccgtgcccagaagcacattgaaggacaaggggcagacttaatcctgtccgatttacgcttgccggatcacgacggaatcgatcttttgaaatggatgaacgaaaaaggaatcgatattcctttgatcatcatgaccggttatgccgatatccaatcggcagtgcaggcgatgaaattgggagcacgcgactatgttgccaaaccggtaaatccggaggaactactcaaaaagatgtcggaagctttgcaagcaaaagaagcaccgactacgcataccgcagccaaaacttctgcaaagaaaggttcttccgcttcgtccggaaatgccaccgaagcccatcatgcttatctggaaggagaaagtgatgccgccaagcaactctataattatgtaggcctagtagctcccaccaatatgtccgtactgatcaacggttccagcggaacgggaaaagaatatgtggcgcaccgcatccatcaactgagcaaacggaatgacaagccgtttatcgcggtagactgcggttcgatccccaaagaattagctgcatccgaatttttcggtcatgtgaagggttcttttacaggagcactgacggacaagaccggagcgttcgttgccgccaatggaggcactatcttcctggatgaaataggaaacctcagttatgaggtacagatacaacttctccgtgccttgcaggagagaaagattcgtccggtcggttccacgcaagaggtttcggttgatatccgcttggtatccgccaccaacgagaatctggaacaggctatcgaaaaaggtactttccgtgaagaccttttccatcgcatcaatgaatttaccctgcggatgcccgacctgaaagaacggaaagaggatatcctgttgtttgccaacttcttcctcgatcaggcaaacaaggaactggacaagcatctgatcggttttgactcgaaagcctcacaagccctactcaattatcactggccgggcaacttacgccaaatgaagaatatcgtaaaaagagcgactttactggcacaaggcagtttcatcactcttcttgaattagggaccgaattactggaaacaagtaccgtttgctccgcaagcatggcgctgcgcaacgaagagacagagaaagaacacattctggaggcattgcgccaaaccggaaataacaagagcaaagcggcacaattactgaatatcgaccggaagacattatataataagctgaaactatataatatcgacttgtaggttatcaatcagtactacccatatatttagaaggagatacgccgaactgttccatgaagtgcttcatcctattaaacaatatatagcaaacaaacaaaattaagtcagaacatacaaaaaacgaataaagaaatggacttatgaattaaacatgtatgttgaatgaaagaaacaggcatactcggaaccacattgtttgcgtacatttgcagccatacaacaacctgatgtacaccttttaaataatatacaatgaccttagtttatcttaacctgtcagacacaaaggagatatttttatgataatgcacataccaaagagtacatattatcataaatggttcatcggagctacactcgtcgttccggttcttccgcttgccgcccagacgtctccgaatcttgtcttcatcatggcagaccagtatcggggggacgcactaggttgtctgggcaaagaacccgtaaagactccttgcctggatcatctggcttccgaaggagtcttattcactaatgcagtcagcagttatcctgtttcatcacccgcccgtgccatgctgatgacgggcatgtaccccctgcataataaggtaacgggcaactgcaattcacaaacagcgccttacggagtggagcttccacaggaagcccgctgttggagtgatgtactaaaagacatgaactatcgtacgggatacataggaaaatggcatctggattctccttacaaaccttatgtagacacttacaacaatcgcggcaaagtagcgtggaacgaatggtgtccgcccgaacgccgtcacggatttgaatactggacagcctacgggacatacgattatcatctgaaaccgatgtactgggacacgactgccccacgtgacagtttctactacgtcaaccaatggggccctgcttatgaagcggataaagccatcgaatacatccagacacaaaaagagaataaacagcctttcgcactggtcgtatcgatgaatcctccgcatactggttacgaactggttcccgacaaatacaaagccatatataaggatatagacgtggaagccctctgtgcccaccgcccggacatacccgccaaaggaaccgaaatgggaaactatttcagaaataacatacgcaattattacgcctgtatcacaggggtagacgaacaggtaggacgtatcatcgaaaccctcaaaagcaacggactttttgagaataccatcgttgtatttacttccgatcatggcatctgcatgggagctcacaacaatgccggaaaggatatcttctacgaagaatccatgcgcatccccatgattatctcatggccggcaaagataaagccacgcaaagacgaccatttaatgatcgctttcgccgacttatatccttctctcctttccctgatgggattccggaaggaaatacccgaaacggtacagactttcgacttatcccgccatattctgggcaagagtaaaaaagaagtggtacaaccatattattatgtacagtttgacaatcatgccaccggataccgcgggctacgtacgtcaacccatacattcgcagtccacgcaaccaatggaaaaatagacgaaacagttctttacgaccgagccaaagacccatatcaaatggataatattgccggacaatccccccgtctggtccggcaattcaacaaacaactcaaggcatggctactccataccaacgattcatttgcccattatcttgaaaccgtaactaaataaacaccatgaagaaactttgctatctctctctttttatcctatactcagtttgcagcttcgcacaacaacaggctatccccgtccccaagccccatcaacttaaatggcatgagacggaaataggagctgtcttccattatgaccttcacgtgtttgacggcatccgctacggacaaggcaacaaccgtatcaatcccatcgaagattacaacatcttcaacccgaccgaactgaacactgaccaatgggtacaagccgccaaagctgccggatgcaaatttgccgtactgacagccacccacgaaacaggtttcggactctggcaaagcgacgtcaacccttattgcctgaaagccgtgaaatggagagacggaaaaggagacattgtccgtgacttcgtcaactcctgccgcaaatatggtctgcaaccgggcatctatatcggtatccgatggaactccctgctgggtatccataacttcaaggccgaaggagaaggagcgttcgcccacaaccgccaggcttggtacaagcgcctgtgcgagaaaatggtgacagaactctgtacccgctacggagatttatatatgatatggtttgacggcggagccgatgatccccgtgccgatggccccgacgtggaaccgattgtcaacaagtatcagccaaactgccttttctatcataacatcgaccgtgccgacttccgttggggaggttcggagacaggtacagtggaatatccctgttggtctacctttcccgtcccctgctcacaccataaacgcattgaaagcaatatcgaccagctcgaactgttaaaacacggcgataagaacggcaaatactgggtaccggcgatggcggacactccgctacggggagcaaacggccgccacgaatggttctgggaaccggatgacgagaacaacatctatccgctaaacacgctgatggacaaatatgaaaagtcagtaggaagaaacgccacgcttattctcggactaactcctgacccgaccggattaatccctgccggagacgcacagcgcctgaaagaaatgggagatgaaatcaatcggcggttctcctccccgatagcccgcatttcgggacaaaagaaaagcctgacactgaaacttggaaaggagcagcctgtcaattactgcatcatccaggaaaacatcaaaaacggagaacgcatccggcaatatcagatagaagccaaagtgaacggtaaatggcaaacagtctgcaaaggagaatccgtgggacacaaacggatcgaaaagtttgaaccggtagaagccacagcattaagactgaccgtatccgaatctgttgcactgccggatattatcaacttcagcgcctattccgtaaaataacacaagaggcatgagaagaattatccacatctgtttatgggcattgacgggcatcttcgcggaagcatcgctgtctgcacagaacccgtttatctaccataaagggaagacatacaaagatgttgcagcttatcggatggaagaaatcatcgacctgagcacctatactccatccacccccatcttatgcgaacaacaagtgccggaacaccaaagcactctttcgtataaagttgcacttcctttgtatgttcgtggtatattcttcagccgtgattcccgccccggcgactatcaatggccgaataataccaaccggttgctcccctggatgttcaaccgtctcgaagacctcacacggagcgattatgcaggcattccttccaatgccctgccgtccgcatcgggcgatgcactgctccttgaactcgcagacggagaatatctgttcgccaaagccattgcgggcagcaacagcctcagctggtttcaggttaatcaggacggcacgctcacgctgtatgtctccacactaggagaagatgcactgaccggccgactccccctcctgattttccggaaatcttcatccgtctatcatgtattcagtgacgcctacgattcgttaatcgcagacaaagccgcatctaccctccgcaaaagagcggacaaagagtatttcaatgcctttgactatctgggatggtgtacgtgggagcattatcatttcgacattgatgaaacgaaaatactaaacgatatagatgccatcgaagcatccggcataccggtacgttacgtattaattgacgacggacatatagcgaacaagaaccggcaactgaccagcctcgtccccgataaaaaacgttttccgaacggatggagccgcatcatgaagcgcaaacaagcagataaaatccgatggatgggtctgtggtacagcctttccggctattggatgggaatctctgccgagaatgactttccgccggaaatccagcaagttctacacccctacaacggcagtttactgcccggcaccagtacagagaagatagaaacatggtacgaatattatgtccgcaccatgaaggagtatggatttgacttcttgaagatagacaatcaatctttcaccctcccgctctatatgggcggaacgcaggttatccgacaggctaaagactgcaatcttgccctggaacatcagacacatcggatgcaaatgggactgatgaactgcatggcacaaaatgtgctgaacattgaccataccttgtacagcagcgtaacccgtgccagcatcgactataagaaatatgacgagaatatggctaaatcacatctgttccagtcatataccaatacactcatactggggcagaccgtctggcccgaccacgatatgtttcattcctgcgatacagtttgcggcagtctgatggcacgttcgaaagcgatctccggcggacctgtttacctgtccgactcaccaggcgaatttattgccgacaatatccgccccctgattgatgaaaccggaaagatattctatccggcggctcccgccgttccgactccggaatccatactgaccaatcccctgcaaagcggtaaagcctaccgtgtatttgcccctacaggagacgaagcgctctcagtcatttgctacaatctgaacacttctcccgcttatcgggaagtagaaagtttcgtcaaacaggaagattacctgttacgggaaagcaccggcaaatccgcagattcttcttgcgacagcattctcgcattcaactgggaaaaacagagcgccgaagtattgaacgcatctgaaagaaaaataaagttatccggatttacagatagtctgttccatctttgccccatccgtaaaggctgggcagtgatcggcatacaagaaaaatacctgtcgcttgctactgtgcagatactcaaacgtactaccgataagctgatattggatgtccactgcaccggtacattaagaatatggacagactcccacgggaaacaggaattacggagcataccgatcaaaaaggccggcagaattgaaataaagaaataacactaaataattaatccatgaacaaaaaactacttttccccctcgcactcgtgccactggctgccaccagcctgcaagcacagaagtccgcccagacacagcgtgtggacaaacgccccaacatcatccttttcatggtagacgacatgggatggcaagacacttcactccccttctggacacaaaagacagattacaataagctgtacgaaacacccaacatggaacgacttgccaaacaaggcatgatgttcacacaagcgtatgccagcagtatcagttcccccacccgatgcagcctcatcaccggaacgaacgcggcacgccaccgcgtaaccaactggacgctgcaaaagaacacaaagacagaccgcaaggacaaagtgctggatgtgccggactggaactacaacggagtaagccaagtgcccggcaccaacaacacattcgtaggaacttccttcgtacaactgctgaaagacagcggctatcatacgattcattgcggaaaagcacatttcggtgccatagacactccgggagaagacccgcaccactggggcttcgaagtaaacatagccggacatgctgccggaggactcgccagctatctaggagaagagaattacggtcacaacaaagacggaaagccaatatcactcatggccgttcccggacttgaaaagtactggggtacggagaccttcgtcaccgaagcattaactctggaagctatcaaagctctgaacaaagctaagaagtacaaccaacctttctacctgtatatgtcccaatatgccatccacgtcccattggacaaggacaaacgtttctacgacaaatacaagaaaaaaggcatgaccgaccatgaagccgcatacgccacactgattgaaggcatggacaagagtctgggcgatctgatggactggctggaaaaaagcggagaagccgacaataccattatcattttcatgagcgacaacggaggacttgccgccgaatcgtattggcgtgacggcaaactgcacacccagaatcatcctctcaacagtggtaaaggctccacctatgaaggcggcatccgtgaaccgatgatcgtcagctggcccggtgtcgtagcccctggcagcaaatgcaatgactatctgctgatagaagacttctatcctactatactcgaaatggcgggtatcaaaaaatacaagacagttcagcctatcgacggcatcagcttcatacctttactgaaacagaccggaaatccttccaaaggacgcagcctcttctggaatatgcccaacaactggggaaacgacggtccgggaatcaactttaactgtgccgtacgcaacggtgactggaaattaatctattactatggtacaggtaaaaaagaactgttcaatatccccgatgatataggcgaaagtaatgatctcagcgcacaacatccggatattgtgaaacggctttctaaagagttaggaacctatttgagaaaagttgatgcccaacgtcctattgtcaaagctacgggtaaaccttgtctttggccggacgaaattgagtaatcattcaccagtttagtcagctccaaacaagtaacatgatattccagctaaacagacgaaaaactatgcattttacgaatacatagtttctaaggctactcaaatactggtataaagcagaaagcctacaactattattatattaatacacagccaaatacagtttactatattctcaaagtattctcatgcctttgagaaaaaattctcaccacgatgagaaaaaattctcatgcctttgagaaaattttctcattgcagtgagaaattattctcattgcggtgagaataaaagactttgcaggaatctgataattagttcattacttttcgtttttcagatgctttagttctttactcattaagtataggttcattgaaacataaccattcttgcattacttattattatttacgtaacaaagcagactattgtggaataattccacactccccaccccattttccacacattccccatgcgtttccacacaatagacaatgtacatcattcacatatctcacttataatcaatacattgatagcgtacatcagtctttggcacgcactttgatctttaattagccgttagataaagcaacaaccgattccttaacacataagagagaattgaaaatatatgtttaataatcattaaagcaaacgattatgaaaaaattagtattagtagtagcaatgtttatgtttgtttgtggtggttcattccttgttaaggctcagaactctgcagaagctgcgacagccctggcagaagttaatgcaacagctatcgttaatgatacagtagtaaaagatactgtaaccaagagcgaggaacctgttaagacagaactgagtgcaccgaccgctattgtcaacgatacagtcgttactgacactgcatccaaagacaaaccggctgagcctgtcaaggaataacctttccaaaaactcacggaacatagtctgccgaacaatagtaagcacactacaaaaaaagccatccctacttcgtctattccggggatggcttttttattttcttattttccctaaacgggaatcattcaactatcggttttcacgttccaatactgccaaccgggcatacaattcaaccaatgccccctgatggagtatttcccaaccggtcttggtcgttccccctctcagatcatcgtcattcagcaagttgttaccctgatgacagctactgctccacgcatgaatcattgacttttcgatatcatcgatatatttacggtcattgtctatagaataaagttcaaagaatccgcggcacatgatcgtattgaaccaggcatgtcccggagcaagaatattgaaagtaaggttcagttctttggaacgatagggcataaaccatttcttatgacagctttcagcaatcgcatacgcttcatccagatatttctgttcgccggtaatcttatataaaagacaggctgcctgcaacggctgtccggaattgtaagaatacttgttcttttcaagatcacccggcagattgggatcatccttattcgggcgtacattgtcatagaataaatggtcggacttgtcttgcaatacatccagcatatagtcgtaacatttgatcgcccagtcgagatattcctgttcctgagttgccagatacatcttacagcccatcacagcagtaggtccggtagagcaagagtgcttgctggtagtgtgttcgttcaactccctccagtgcacgcctcctccgcaagtctcatcccaaccgtgatcgatcaggtagcgccataccacctttgcctgtgtcagataacgcatctctttcgtttccgtataccagtcgaccatatcgagcccgatccatacgttatcatcgtaaaaacgttcgttaccggcagccgggtagcaagaataagccaggattccacgatccagctgacagaaatactgtattcctttgaacatcatatcatccattgcgccatagatattctccacttcgctctctttggttgcatcacgcatagcgacaaatgccgaaagaccgccaccttgtccccaaactaacgcatcaccatcccaataaccttttccatcataaggataattaccacgccagcagcttctggaactcttgccgaaataatatccaatgacagaagtcatgtaagaatgtgcacggtccagcatttccggcagtttcagttccggctcatccaccttttcatgataaggcatcataatacggctttcgggtaccgatcgcttgccggctttactgatagctacggcagaaacttcgtaagtagcaaaataaggaactttcaacagatattcctgtgtaacatcacgttctacctgtatgatgatatgtcccggcgagaagtcggtagcacgagacaagctcgcttccacgtccctgtaagagagttctaccatatccacgtcgcgattactgggattggtccatttcaccagaagttcattctcgttattggtagcttctacggaaaatgaacctaccggagaaatattgccactgatgggatcattctgttctgagtttgactgatcatcatcactacaagatggaagtaatgccaaagccaagaagttcaatataaacagtttgaatattgctttcatttttcttcaaatttagagattacttaaaaggtacttcgataggagcttccccgaatctgctcattgggaattctgtagcattgaagctgtcgtacttacaaacatgcatcaacaactcgtgatcggagtcagtaccatcttcaatgtaagcaaccggtgcaccggcagagaaatcccagcgtcctaacaaaccttccgggttttcttccacaaagtcccatgcgttggctttcagttgcgcttccgtacggcatacagaccagatacgtgcttcaagtacagctccgcccaagaaacgattattatcactagccttaccaatggatacttttcctccatcatttcctgcgcaaagatctatttctgagaaattgagatcattcctctttatttctccccaggcaactctgctgccattaatataaagcttgtacttttcactcggattactttgtgctacgtcacagtctaccaccaaagccagatgcatccactcgctaagcttaatcgcattatgccctgttctcagttgtaatttatcgcctgtccctaccaggtcaatgactttccactgattaccgccttctttgcctttttcaccatcgtcaccgccacggagaataaagtaaccttctttacccataatggtctgcaaccaataagtattatcgatacggcaagtcagctcccaggtcatcttcttcaatttgaaatcgttggtcgcagctttcaatgcttctactccttcgcctgtcatttctccgaaatgcgtccacacggcatagtctcttcccagattcatacaccaacgtttgtccggtgcaatcttcacctgaataggttgcgatacctgtcccttggcgtcagtcagcgtaaaggaagtttcgccggcttttcttccggtcactgtcactacgttaccataaagttcgagacggactactttcgtatcgccggcatcaagtattttatactctccgttaccactcaaaatctttacttgctgagaaccttgattagcattgatcagtacacccttttcatcagcgtcggtcgtaatctgtttaggagcaatcacattcagattcacaaaggcttcttttcctttccggtcggttatcttgacctcggcatttccctgggcgatgcctttcacggtgaatgattccgagtcttcaagtgtagactgatcgacttcgatacaattattttcatctatcacttccagcgaataacctccgtttcctgtatagattttgacgaaagcttcatcggcgccttccacctgcgaataaagcgtaaataacgtcttattcaacttcagatcaaactctgccgccgtgttaaccaaaatcttagcgcgctggtagtacttgtctttcacgtatactacaccctgagcattgttatgtccttctacagctgtcagtgtcactatatcaccatcgacttctgccgtcaccacttcttcgtttgccgaagtcacctcatattcgccattaccggacgtaatttttacggttctggtatccccctgtgcgatactgatttcactggcgtcaacggttagctctgccagattctggggtgtctcattatttttgttgtcgttatcatcgccgcatgcactaagacaaagcaatgatgcgagaacgaagtatttcatcactttcatatatattataactaaggtaaattactcttctacgtctacattaggatagtctactctcaatacatctcttgacatagagaaagtaccttcgaacgacatcattaatgattcgccctgtgcagagtcctgatattcataagccaattcaatggtagtaatttctgtataataacgttggtctgtatagttatacgtatatttacgactgagtttggcactataaggtttaaacttcaatccatccacatggctggttaacgttatgtctccgaaatcatcacgttttatttcaaccacataattcagatagtccgtagtgttggaacgtgtcttctcgcccacaaacatatagcaggtattattattaattgcataaagttgtgtgctggtcgtttcagtcgtataagttgttccctgttgtgtcacaacgcccttaccactataaatacccgaataatcgttcttgaaaccgatatgtgccaatactttcgtatatttattcgctcccatctcttctcctgtagaagaagtgatgcgcaagggaagtacataatcattatacaagttgcctacttctctaatcttattcaagtcgatatggatataagccgccgcattcaattctccacttttaatattccatgaatcggcatcaaacgtataggttccttccggcaatattttataatataaatccgtctggctcttatacttgtccttattatacgcatccagcgtatccgggtcaacttccatcattatatgaatttccttatcatttcccgatgtaccatttactccgaaatatacaggaagtacggtggtattatcatcagctacctccaatgagtaatcctgccaaccattatgaatgatatatgtattcttcttgaataattcatcttccaatttatcgcatgaagaaactccgggcagcatagcgatcagcagacttcccattattccgtatatagatattatttttttcataataagccaattttatttagttttaccattcaggattctgcgtcatattcacgttacgtttcagctcgtaagtcgggaaaggccacaaatacattttctgttcaaacactttgtgtaccgaggtgatgatagtctgtttataaaaatcagcaatacgcgtttcatcatcactgatattaatgttacacccctgcaataactggttttcttctgtcatagcatctttccaacggcgtaaatcaaagtagcgcatactattctcacccaataactctatctggcgttctcttttcaatttcacacggaaatcgttcgggttattataagtctcctctgaatagtcaggtactccggcacgcatacggatacgtttgatagcataacgcatttcatctacactgcgctgaatctctacatcagctccggtataggtagtcagatggtaaacttgtcccgaagtcaactcattcaacgcttcggcataaatcagaagaatttcaccataacgaatggtcatctctgttttatcaaccagatatccgccttcagtccgtgagtcttccgaattataaaacttctttaaagtaactcctgtcagtggacattcttccttaaatccctgtttgccatcgttcagaccacgataatagaatatctgttgatcgcggaattcagattcagaagcactggaagcttcccaaaccgaaccattataagcgatggacgcatagaagcgtggttcacgattattgtacatcaaattcaccttagccggcaggaaaggattcgccacagcatacgcctgtgtagtgaaaccttgggttacgtaatcaccggtagcttccgcctctgtgatagaacgtccgtcgttcatcgcatacgcatcgacctgcttctgagtaacagccaaccgattgtttccttttaaagtctttggcgtagattggtaagcccagtcattgatatgtcctgttccaattcttgtccgggtaaatataagttccggatttttcgatcccagaatcgtaccgtcaaagttggacttataagaaagtaacgggtctacgtccgcccaaccttccggatagttcttatccgaataaagtgcattatgaggaggacgttgtgaaggcagaacggtcgctttcggcgctacaacatacagttcatacagaccggaagccttagccaattcaatcacatccttagcagctgccgccgctttcgcccactttgtttcatcataagtctgagacactaattgattaccatagcagtctttcacattaaagaaatccgtatttccgttgaaaagcgggctggccgcataaagcaacacacgtgaacgaagtcctaatgcagctccgcgagtcggacgtccaagattgttgaccgttcttttagtcggtagtgaacgggctgattcagccaattcctgatctataaaatcaaccagattatcaaaatgctctcgtggcaaggaaagttcttcataagaaagattcacatccagtccttccaaaggaatcaaaggtacgggaccatagacgcgtatcaaagcccagtaacaataagcacgcaagaaacgtgcctgtcctttcatatcggctatttcatccatcgtcagttccgaacagcgatctacattctgaatgaaagtagatgcctttcggataccttcataatatttccacagtcgtgactcattttgatctttatcgctcaattgattatcagcactatagtttccttccacataatccttcatgtccggatggtaaagatcatcactagcccagcggaacggttctctatattcaccaatataatccattacactgtatgcactcgacaaccatccatccacatacacacgtttggagaaagcggagtccaaagatacctgatcataaaagtatttgtccacattgatataatcggtacatgacgagaaggacaatgtacctatagccagcaatatggtataaagtattcttttcataattcgtagtttttgatttaaaagctaaattgaagataacaggagaaagttttattaatcggatagctacttcccgattcatttgtaccttctggatcccaccagtcaaacggtgcccaagtaaacaagttctgtccgataaatccaagacgcagattactcacaaggaacttgcgtgtccatacctgaggaaagtcataagaaagttccacatttcttaagcgcagatattttctatccttcaaccagaacgtagatgctcggttgttcatattgttgtttccataagtcaggcgaggccagtcggcattcggattttccgtagcttccgtgcccgaaatttcctttggaatccaacgattaccatctaccataacttgcagaatattacctgtacgaccgtcatggaaagcatgaggtccactgccgcctacgaaaaagtcacatttaccggttccttggagaagcatgctaaagttccagttcttccaactggcgctcaagccgataccatactgaagtcccggctgctgacgatatcccaaaggtacctcatcatccgttgtgatgactccgtcaccattcacatctttatatttaatatctcccggaagtattgttttgttagccaaagatgcctgagaaggacttctgtcaatgtcttcctgatctttaaacaaacccagggcgataaaaccacggctctgattcaattggaaacccttattcatcttgtaccataattcattggcggcctcatccatatccaggatatcagttttctgataagtaaaattaccacggagttgcagactcacctgtccaatctgctgggtgaaagcgatatttccatcccatccgactgatttcatcttacctacattggccataggtgtttggtcggcaagaccggttgtcagcggcatttgattgcgttgcataaagatatcatcccgtttatcaacaaagtaatctactgttccggtgactttcccattaaagatactgaaatccacaccgatatcatacttcttggcaacctcccaggtcaaattcgatgttcccagtgttttaatacgataaccttgtactttgttagtaccaaattcaccaaaagtatacgatcctccatcatccgtacttaccaaagatatataagggaagcgacgtgccttatcatcggtcaagctagttctcaactggtcattacccacctcaccataagaagctctaatcttaaacagatccaaccacggcatcgctttcttcacaaacgattcttccgaaaccacccatccggcagatacggccgggaaaaagccaaattgctttccatgttcaaaattctcggaacctgtataaccccaattaaattctgccatatacttatcttggaaagcataagtaaaacgtcctgaataagccaagttgcgatgaggaatagatcccatcaaatcactctcatcaaaattgacgtcagtagtctcttgctgatagaccatagcaaacactccaacgcgatgtttctgagcgaacaatcggctataatccaaagaagcttgcaaataataacgtttatctccttccactttttttgtctgagacattgcagcagcattctgtactctcttcaacaccagattaccgtttgcgtcacgagaatattccgcagaccacaactcttgcgctttagaacgacggatggtattcttattataggtatcaaaagcaaagactccggaaaatttcaagcctttcgttataaacgacaagtcctgatccaaagcaacgctactttctactttgctttcccaaatagtgcgatatccggtttgagtcatctgatactcaggcgtagtcatgccattaacaaccggccattgacctgtagaccatttacgcggagaagacagcggagtatagtaagcaaaggatttccagatatcatccgcatcgctctgtggagaattgcggttaaccaaccatccgcctacactcactttcaatatcgttgaacgggttaagttcatatctacattcgcacgatagttccaacgttcatacgtcgtatttgtattgtatttattttcagaactggaagtacggtaacgtccgtcttcactggtatactgtcccgatacgaaataacgtacattatcgctaccaccggagaaattaatattggcataatagctgggagctccacttttcagcatcaagtctctccagtctacattcggataaagatcagagtccagtccataccggataatattcatctcttcacttgtatacagagggctttcataacgtccttccaaagcctcattagccaaactcgcccaatcataagcatttgcatattcaggaaccttcaccggagtattccagctgaaaccggttttcacattaatcttcactttccctttttcaccacgtttggtagtaatcaggacaacaccatttgcaccacgttgtccgtaaatggcagttgccgacgcatccttcaacactgagaatgattcaatatcttctaccggaatctcattaaagctacgttctactccatccaccagtattaaagctcctgacttggcaccaaatgtactcataccacggatccagaactctgacatattttcacccggttcaccgctggtttgcatcgctatgatacccggtacaacacctgccaatgcattcgaaagattagctcccggagcattcaactgtttgatatcaacattggtaatggcaccggtcaaggtctttttcttctggataccactggcagtaatcaccacctcatcaatcttacggttatcttctacaattttcactttcagattattccggtctttgatcgataacacaggaatttcaactgtctgataaccaataaaagtcacttgaagtacatcataagctcccacctttatggtaaactctccatctaagttggtaatcgtaccgacgcccggctgatttttagcaacaatcgacgcaccggcaacaggaccaagattatcttccactacccccttgattacaaattcctgcttgctctcctgtgcccatgcactatcaggcacgagcagcattaccgtcaagagtaatacgatacatttttgaatattattcatggataattctttttatagattatttattctactgtcacacgacgaataacatggttatcgcggtcagccacatagaccgagttgtccggataaaccgtcacacattcgggctgattgaattttgcttcttcgggcaaaccgtcaccaaatccactctgctcgggttggccggcgtacagagaagcggaacctgccggtgtgattttacgaataatgtggttattacgttcgggaacaaacatatttccgtcttcatcaaatgccatctgctccggcttattcagacggacagtcgcacctgtaccattgatatagccactttcatcccatgcgccgacaaaaagaaccggattcccaaaagtatgtgtagcagcatcataaggaacctgatagatacaatggcggttacataccgctacataaaggatcgtaccttcggtattaaaagtcatacgggtttcaatttccgttgcattgttaattcggaagagaggggtaaagtcttcgtaactcggtccgtcaaaacgatacacatagccagtacctttattacagaagaacacttcccctgttttgggatgtactgccagtcctgtagtgccgactttcttcgctctgcaaagtcctcttacatccacgaatccaccttcgcgcgttacataaataatattgaagtcagtcttggtattactctcatccgtataggaatactgagagatataaagagtgtcctgagccggactgaacgccagacaggtaggtgactgaaacggaccgctggaacactgcaccaaagtttccacttcaccattacgtgcacggcgcaaagcaccattctgtgtctgaccacgtccttcatctataaagaataccgaaccgtctttatcagacagcaaaaaccaggttctctgcagcttggaagcagcataactgccgtcctcacgaccattcataccgtgttgtcccaccatcgtcgtcacattacgcttaaactgataacggaattttgtctcggaagcatactcttctatattttcgtctttacctataaacagacgaacataacctgtatctgcacgtgcgggaacgatggcatagattacctcatcgtccattcctacaatagctgcttccttgttatttacagtgaccttcacataacttggatcggaaccgaaattttttccacggatgattaactgtgttccgataccaccactgtcgggagagaaactttcgaaaacagagtgtttactcaaatcgggaggtaaggcttgattttggcgtatcggagccaagtcattgttgcaaccccaaaaggcagacatccctattaataaggtaagtccgatttcaagcttacgcttcataaataaattaggtttcataagatattaaatttaattcaaacaaaatgaaataaaaggtaaaaaggaatcattgcatacttaaataaattaagtggaggatcgtgttgttgattcatagtttcatgagatatttagttaaacatattatatatattcctgcttctttattgcatcagcaaaattagcgtgtttgccaaaattctgagttttccttcttcgtgttttatgccacacggcagggatatttactattttggcatgatttgataatattccggttttctttaaaagttaaattccccgcaatgaaggctgagataagattcagaatatcgataacaggaaaacgaacttcttatttacttttttggcatagacatttactcgcttacaaacctgctatagagcatattctctcagtgtaatcagactcttcaccttccggaaaaagtctcgttatgctatacagacagtcaacagaagggactgattattgcacttcttccaagtgtttggtccggaattcttttggcgtgcatccgtacttttcacggaatactttaaagaaagtgaccttattagagaatccggcttcgaatacaatttcatcaatcgtctttttcgttttcagcagcaaatctttcgctacatgcaaacgacactccttaatcataatcgtaggactttcttcccccatctcctccattttccggtaaaggctgcgaacgctgatagccaaatgatcggctatgaaacggggagtcagttccttctcctgaatgtggtcattgataatcttcagaacagattgctggaactttttcgattccttatgtgtcagtttaccatctgtcttttcaaaagagctgattgctgaactgaaataatccttcagtacttccttacgttccaacatctgacaaacagagatacggagatattcggcattaaacggtttggtgatatacatctcggctcctgcagaaagtgcagccatctgctgttccatttcatgccggccggaaaccataataataggtatatgtgacgtttccttcaccgacttaatccgtttcgtcaattcgataccgccaactcccggcatcatgatatcgcaaatgatcacattcggataaacttcattcaatacctgctccacccgttccggctcctgcagggtgaccacattaaaatcgttagagaagatttccccgatgaaccacaacatttccagttcatcatcaatcaccagcaatgtaggccgcatcttgtcaaattcatagtgaggaagtttcagcaccagttgcgactctatttttggaatgtattccgaagtgattcgtttagaagacgatacgccggtagtcacttccagcggaggcaatgacaaagtaaacaatacccagccgtcaggcgtattttccactttcagcgtaccattcagcaatttcgccatattgtaggaaatggcaagtcccagcccattacgggagaagttcttttcatcctggttttcaaagctatccaggatagcataacggttgaaaacatattgaaagtcttcttctttaatcgtacttccctcattggcaacccggagaaccagcaggttttcatcgttggtatccacttctattttgatacttttcccatccggagtatacttgaaggcattggatatcagattgataataatagtattcagaaaacctttgtctgagttccaggaaacttgctcgggtatcttgctcaggaacgtgatattccgggatttagccatatcgacaaaggtttttgccgtatttttcattaaggaagatacattcagggcctcgatcctcacttcccggtttccggtttcgatacggcggaattcgatcagttcgtgaatcaggttattcaaacgttccgcgttcgtctgaatcatctgaacataatcgactacgaatttactgagtccttttgatgaaaggatacgtccgcaaggaccgtagataagagtcaacggggtacagaactcgtgagctatattagtgaagaaacgaagtttcgactcaaatacattcttttgatggcgtttctctatttcattcagcagttcctgctttttccgtttggtgcggagaataaacgaacgtaccagcatggcggctatcataagcagacataaagaataaatgagatatgcccaccaagaggcgtaccacgggtcaccgatccgtatcaacaaagaatagacttcactttctttatcgaatacactattgtagtacttcaccaataacgtatactcaccgggagccatgttcgtgaaagagacagaactttctttaccattattaatccactggtcactcaatcctttcagtttataagaataggtgcagttatttccgttcagataatcgacagaggtgaatgaaacggcaaagaagttctggtcgtatttcaaattcagtacttcattctcttttttacgggtgataaactctccaagattgtattgttctccaaagatagagagtttgtcaaagtagatgggaggcatataaagctgttcgggacgtccgtctgcctgaatagctacaaagccgttgattcctccaaaaaacagtatacccgtttgcgggtctctgtaggaagctccgtcactaaattcgacgactttaagcccgtcgccaaagccgtaagagcggaatacatttcttttggtatcaaaattaatcaatccctgattcgtactcagccagaagttatcggacgaatgcctcagaatggcatgaatagtactgttcagaaaaccgtctttcgcattaaacagttgataagagttttctgaggcatacttgatgactccataagtagtaccgatcaaataattgtccgcatcatcttttataataggtactaccttgttcaagttcatattctcatacttatgagtggtcagcggttccaatccgttgatcgtttcattgaagcggtataccccgtatcccatattgccgaacaacaggttcagactgtcccccttgcagatcgtaaagaagtaattagagccgaattctccgccattgaccacatatcgttgtaacttttcaagaaccggatgatccggtgtacctccgatacgcgctctgactactcccatccccacactggccagccacaattccgagtcctccgtttcataaatatcatgtatgtatttgaattcctcattatcaatccagagaggaagtttcttgatacggcgttcgcgatacgaataaaagttcagtccttcttcatcaccgatccataacaagttatggttactttctctgatacagtagaccgcattactgcctaaaccgctgttcgatgttgtcagtatctccgagcggcagtccgagatattcttttgtacctcataatcaaagattttaagtataccattccctttggtaccgatccaaaaagtacgctccttgtcaagcagcaaagcacgcacgggccgttctatcttttcggtatagttattcagtacaaccgattttatagaataaagaggatttgagtaaagataaacgccctgcccatccgtaccaatccagacaacatcctgaaagcggtcttttatcaggctgaatgttccgctatttataggtaaggtctgaatctgatattcaccgctgtctttttgcctttccaacaccagaacaccgtccatcattaagccgacaaaaaagctatcatgatatttaacaatggaggaaatcttgtcatgcgcctgtatgttcgctcccaggttagctataaattcattctttttactctcaatatgaaaggcatagagattgtattctttatccacgtagtaaacggcggcgtcatcgtaaaagctacaaatcaatggcgtgtgatgatccaaaccgcttttctgcgatactaaagtgatattctccgtcagagggtcctgttgcaggtcataacaccggttataccctttcatcatcacccacatacggttatttttatcaaagaagaaagtaatgacatccgatatcgggataccggtcacattgattttcttaaagatgccttccttcttatgaaaataatagatgcagttggtgtctttaatgataaacaaggtgccatgattatccttattcatcaagaagagtttctgaaactcattaaagcgtgtaatggagttcgttttacggtccaggcgtatcaggctataataagtctgaaaccaataagtatcgttaccggtataaacaatattatcaatttgattgccggataagtaatcctccttgtcacgggtcttaaactcttcgatctcctgaccgtcatagatattgagtccgtcacaagtgccgatccacatcagtcctttgtcgtcctggcacagagaagtaatagagctgttggacatatattctttgtcggcaacctgcttcagattataggcaccggctgtattcatcagcagattaaggcagcagaagaaaagtaaaatacaatgttttttcatggcatagaatccttagatttgcaatatgacaaaggtaaacaaaaaaactttccagcacttttttggcgcagaatatatgtaagaatgcgtgccagtttggttaattatagcgccacagggcgatttagtgtttcgacttccggtagcggcattccttttctctctattttcgtcacagaaactaattttattcataaattcatttgttcatgaaaacacatttttcatttaaacacctgttatttattggaggtgcggtgttgtacagcatgcaaatttctgccgtcaagaatccggtagactatgtcagcacgctggtaggaacgcagtccaagtttgagttatcgaccggaaatacctatccggctacggcactgccgtggggaatgaacttctggacaccgcaaaccggtaaaatgggcgacggttgggcatatacctacgatgccgacaaaatccggggcttcaaacaaacacatcaacccagcccgtggatgaacgactacggtcagttctccatcatgccgatcacaggcggactggtattcgaccaggaccaacgcgccagctggttctcgcacaaagcggagattgccaagccttattattataaggtgtatctcgcagaccacgacgttactacggaactcgttccgacggaacgtgccgttatgttccgtttcacgtatccggaaaccaagaacgcttatgtcgttatcgacgcattcgacaaaggctcttatgtgaaggtgattccggaaaaaaacaagatcatcggttattctaccaagaacagcggcggagtgccggagaacttcaagaattactttgtcatcaagttcgacaaaccgtttacctttacttccggcgtgaaagagaacaacattctcccgaacgaaacagaagttcagggcaaccataccggagcaatcatcggattcgcgacccagaaaggggagatcgttcacgcacgtgtagcttcttcttttatcagttatgagcaggcggaactgaatctcaaggaactgggcaaggatagtttcgaccaactggtcactaaaggaaaagacacttggaaccgtgaaatgagcaaagtagatgtggaagacgataatatcgacaatctgcgtactttctattcctgcctgtatcgttcgatgctgttcccacgcagcttttatgaaatagacgccaaaggacaggtcgtacactacagcccttacaacggaaaagtgctgccggggtatatgtttacggataccggcttctgggatacgttccgctgcctgttcccgttcctgaacctgatgtatccgtccatgaatcagaagatgcaggaaggactggtcaacgcataccttgaaagcggattccttccggaatgggcaagtcccggacaccgtgactgcatggtcggcaacaactccgcttccgtagtagccgacgcctatatcaaaggactgcgcggatatgacatcgaaacactttgggaagcattgaaacatgacgcaaacgcccatctccgcggcacagcttcgggccgccttgcatacgacgcctacaacaaactgggttatgtccccaacaatatcggtataggacagaatgttgcccgtacgctggaatatgcgtacaacgactggaccatctacacgctaggcaagaaactaggcaaaccggcaagcgaaatcgacatcttcaaacaacgtgcactgaactacaagaacgtctaccacccggaacgcaaactgatggtgggcaaagacgacaaaggtgtgttcaaccccaaatttgatgcagtagactggagcggcgagttctgcgaaggcaacagctggcactggagtttctgcgtattccatgatccgcaagggctgatagacctgatgggaggcaagaaagagttcaacaacatgatggattccgtctttgtcattccgggcaaacagggtatggaaagccgtggcatgatccacgaaatgcgtgaaatgcaggtaatgaacatgggacagtacgctcacggcaaccagcctatccagcacatggtttatctttacaactattcgggagaaccttggaaggcccagcactgggttcgtgaaatcatggacaagctctacacggcaggccccgacggatattgcggtgacgaagacaacggccagacttctgcctggtatgtcttttcggctttaggattctaccccgtttgtccgggaacagatcagtacattctgggaactccccttttcaaatcagccaagctgcatctggagaatggaaaaaccgtcacaataaaagcaagcaacaataacaccgacaaccgttatgtgaaggatatgaaggtaaatggcaaggcattcacccgcaattatctgacgcacgaccaattactgaaaggagcgaatatccagtatcagatgagtcctacgccgaacaaacagcggggaacgactgaaaaagatattccctattccctttcatttgaataaaatgtcgtacttttgaatgctttaatgaatgatctaatccaaacaaactaaagaaaacatgaaactaagaaaccttttatttatcgttcttgcagcgatagtcttctgcaactgtcagagctatcagcctacttcgctcaccgttgcctcctacaacctgagaaatgccaacggttccgactccgcccgtggagacggatggggacagcgttatccggtgattgcccagatggtgcaatatcacgatttcgatattttcggcacacaggaatgcttccttcaccaactgaaagacatgaaagaagcccttcccggttatgactatatcggcgtaggccgcgacgacggtaaagacaaaggcgaacactccgctatcttctaccgcaccgacaaattcgacatcgtagagaaaggagatttctggctgtcggaaactccggacgtgccgagcaaaggctgggatgccgtattgcctcgcatttgcagctgggggcacttcaaatgcaaagataccagtttcgagtttctgttcttcaatctccacatggaccacatcggcaagaaagcccgtgtggagagcgctttcctcgtacaggaaaagatgaaagaactgggaagaggcaagaatctgccggctatcctgacgggagacttcaacgtcgaccagacccaccagtcctacgacgcatttgtcagcaaaggcgtcctctgcgattcttacgagaagtgcgactaccgatatgcgctcaacggaactttcaacaacttcgatccgaacagttttaccgaaagccgcatcgaccatatcttcgtttcaccttctttccacgtcaagagatacggtgtgctgacagatacctatcggagtgtacgggaaaacagtaaaaaggaggaagtgagagattgtccggaagagatcaccattaaggcttatgaagcacgtacgccatccgaccatttccctgtaaaagtggaattggtgtttgaccaacgtcagcaaaaataaccccgaatacttcattaaataatctgatacccatatgagaaatatatgttttgtagcctgtatgttgttttgcctcgcttccgcttccggaaaaacggtgaaaaatcatcctttcgtgtccattgccgactctatcctcgacaatgttctgaatttatatcagacggaagacgggctgcttaccgaaacatatcccgtgaatcccgaccagaaaatcacttatctggcgggcggagcacagcagaacggaaccttgaaggcctcctttctgtggccctactcagggatgatgtccggttgcgtagccatgtaccaggctaccggagacaagaagtacaagacgatactggaaaagcgcatcctgccgggactggaacagtactgggacggagaacgacttccggcatgttatcagtcgtacccagtcaaatacggtcagcatggacgctactacgatgacaacatctggatcgcactggattattgcgactactaccgcctcacaaagaaggccgactatctgaaaaaggccattgccctgtacgaatacatctacagcggctggagtaacgaactgggcggaggaatcttctggtgcgaacagcagaaagaagcgaagcacacctgctccaatgccccgtcaacagtactcggcgtcaagctatatcgtctgacgaaggacaaaaagtatctggacaaggccaaggaaacttacgcatggaccagaaaacacttgtgtgatcccgacgacttcctttactgggacaatatcaacctgaaagggaaagtctcgaaagacaagtacgcctacaacagtggacaaatgattcaggcaggcgtattgctgtacgaagagacaggagacaaggattacttgcgcgatgcccagaagacagccgcgggaaccgatgcctttttccgttcgaaagcagataagaaagacccgtcagtcaaggtacacaaggatatgtcgtggtttaacgtgattctgttcagaggcttcaaggcgctggagaagattgaccacaacccgacttatgtccgtgcgatggcagagaacgcgctccacgcatggagaaactatcgggatgccaacggattactgggcagagactggtcgggacataacgaggaaccttataaatggctgctcgataatgcctgcctgatcgagctgttcgctgaaatcgagaaataaaacattgattattaacccttacatgaattaaagaaaacaattaccatgaatataaccaaaacactttgcctctgcgcagcactttcgggcgctgccggcgtgcaagcaatggaaaaccgcgaatttgtgacccagcaagacaatacccgggtcaataattaccagaccaaccgccccgaagcctccaagcgcttattcgtatcgcaggaagtggaacggcagattgaccacatcaagcaactactgaccaatgcgaaactggcatggatgttcgagaactgcttcccgaacacactggacactaccgttcacttcgacggaaaagaggacacttttgtatacaccggagacatccacgccatgtggctccgcgactccggtgcgcaagtatggccgtatgtgcagcttgccaataaagaccccgaactgaaaaagatgctggcaggagtcatcaaccgccagtttaaatgtatcaatatcgacccgtacgccaacgccttcaacatgaactccgaaggaggcgaatggatgagcgacctgacggacatgaaaccggaacttcacgaacgcaaatgggaaatcgactctctctgctacccgatccgcctggcataccattactggaaaacaacgggcgatgccagcgtattctccgacgaatggctgcaagccatcgcaaatgtgctgaagactttcaaggaacagcagcgtaaggacgacgcgaaaggtccgtacagattccagcgtaagaccgaacgcgcactcgacaccatgaccaatgatggctggggcaatccggtgaaacctgtcggactgattgcttccgctttccgcccttcggatgacgctacgactttccagttcctcgttccttccaacttcttcgccgtcacttccttgcgcaaagctgccgaaattctgaacaccgtgaacaagaaaccggcgctggccaaagaatgtaccgcactggcggatgaagtagaaaaagcattaaagaaatatgctgtctgcaaccatccgaaatacggtaagatttatgctttcgaggtagacggcttcggcaatcagctactgatggacgatgccaacgtgccgagtctcatcgctttgccttatctgggcgacgtcaaagtgactgatccgatttatcagaatacccgcaagtttgtatggagcgaagacaatccttacttcttcaaaggcagtgccggagaaggtatcggcggtccgcacatcggatatgacatgatatggcccatgagtatcatgatgaaagccttcaccagccagaatgacgcagaaatcaaaacttgcatcaaaatgctgatggatacggatgcaggtaccggcttcatgcacgaatcattcaacaaaaacgacccgaaaaactttacccgtgcatggtttgcatggcagaatacgttgttcggagagctgatcctcaaactggtcaatgaaggaaaggcagacttactgaatagcattcagtagtctctactccatctttacttataagataactgcttcatacggtgaaaccgatagttccatgctttggaaccaatcgtttcactgtatgaaacaagagttctcatgcctttggaactaaagtttcaagctgccgaaactagagtttcaagctgctggaactaaagtttctcactcatgaaaccacagtttctcaccgatgaaactttagtttctcaccgacgaaactttggtatcaaggcgcagaaaccgaccttcttcgccgtaagcgtctccgcgatgccacagtgacagcaaaactactgtcactctgctatcacaccttgccgtcacctcataacaatcacataatcattcatttgcccccatttatgtgacagatgacagcaaatctttattttttaatttatatgtagagagtatatactcccccaataataattatataatatgaaatcaacctttttatttctggttactacaaccatgatgacttgtaccgccttgggacaaccttccaacgacaaaaagaacgtattacccgattgggcattcggaggcttcgaacgaccacagggagctaatccggtgatatctcctatagagaacacgaaattctattgtccgatgacacaggattacgttgcatgggaatccaatgacactttcaatccggcagctaccctgcatgacggcaagattgtcgtgctgtatcgggcagaagataaatccggtgtcggtatcggtcaccgtacctcacgtctcggatacgccacttcgagtgacggcattcacttcaagcgggaaaagactccggtattttatccggataacgatactcaaaaggaactggaatggccgggcggatgcgaagacccgcgtatcgccgtcacagcagaaggactgtatgtgatgacctatacgcaatggaaccgccacattccgcgtctggcaatagccacttcccgcaatctgaaagactggacaaagcacggtcccgcttttgccaaagcgtatgacggcaagttcttcaatttaggatgcaagtccggctccattctgaccgaagttgtcaatgggaaacaggtgatcaagaaaatcgacggaaaatacttcatgtattggggagaggaacatgtgtttgccgccacttccgaagatttagtcaactggactccatacgtaaatacggacggctcgctgagaaaactgttttcaccccgtgacggacacttcgacagccagctgacggaatgcggtcctccagctatttatactccaaagggaatcgtacttctgtataatggtaaaaacagtgcaagcagaggcgacaaacgctataccgccaatgtttacgctgccggacaagccctcttcgacgccaatgacccgacccgtttcatcacccgtctcgacgaaccgttcttccgcccgatggatagtttcgaaaagagcgggcagtatgtagacggaacggtgttcatcgaagggatggtttattataaggataaatggtatctgtattatggttgcgcagattccaaggtgggtatggctatctacaatccgaagaaacctgctgccgcagatccgctgccctaaacaaactgtttctttctacccgacataaataaaactgcaaggattacacaattctgaatgaacagaggttgtgctgatccttgcagttcttatatttatcaagattgatgcacaaaaaacatatttcactgccaaaaaagtaaacatttgcgccaaccatgcgaattagccctatctgaaggaccttttcctccacattattactaattttatcactatagaaataacacacaacaaatcaatagttatgaaaatagtacaaaccttttggcatggaaataattcattgttagacaatagttttggatggatgaatccacaataccatttaatgtcatgggcattaagttgtctttctttaaaagacaactatcaaaatatcgttttatataccgattcccatggatatgaaatctttgccgaacaattgaaactaccgtatacagatatcatcattcaatacgacaatctaacttgccctgaacctcattgggcatatcccaagttattaacctattcactccaaaaagaacccttcatacatgtagacggagatgtatatttgcctaataaactagacaacaccatagagatgagtgaattgattgctcagaacaaagaaataggaagcagttattataaaagtatgatgaatcatattctacaaaaagatttattaatgccatccttcctaaaaaaagaattagaaaaagactctatcatgtcatataatgcaggaattatcggaggaaatgacttggagtttatagctgaatactgccggactgcatttaactttatcgaatcaaaccatttaaatgatataaacagcaaagatattcacataaataacaatatcctctttgaacaaatattgttttatgcccagtcaaacagttataacaaacctgtggcaacagtccttgatcacagcgttcgtgacaatggatacatttatgatgatttctgtaatttttatctatacgacaaagccaaactattacatatcatcggcggacataaaaagaaccaacggatttgtgatttacttagcaaaactctattaaataaatatcctgactattacaatagagtagtagaattgttcgcgaataatcataagcgaatgcaaaacaaggctaaaaatactaccttccccgatttgagtgtacaaatgtgtattgcatcctatcaagattatcttcattctttgtccaaaaaatgggaaaagctatcttataccgatctgtatgattgggagaaatgctcatcttcctatttcatgtttctaaatgccggaaaagaggaacaagccatatttactattaatagaaatccctacctatccatttacgaaattccggaaccctggccgacagaagcaaaaaaactgcttaaagaacgtataaacaaagagtgccattcagaccactttgatatagtatgcattccatgtctgctatatgagggttttaaagaagtgcttattaacgatttatgttataatattctgattctcatagaagaagagaagacatttgaatgtctgttcaacgaattgctaccttgtttttcatctgaaatcagcaaagataaagaacaaacttacaaattaattctgacggaagtagaatatcttctttatcatggggtgatatgtatcaattgatttcaacttaaacaagtgtataaacttatctatgcatccaaaagaaacgactttatttataaacactaaaattatcatgtattatggaaaagaaaagtaaagcggagaaattaaaattaagagggatcaaccaaaccatattgatctccagttacaattcaggggcaggtacaggtcccaatgattgcatgacagaagaagtttatcaacggcttaatgcccaaggagccttagataccaccgtctatgtatgtggcattggatggatgacaccggacgtaactatctacggtagcggatcaggtttcggttccggtagtggttccggcagcggtagtggttctggcgagtattggggaagcggacactggggaagtggagattggggaagtggtagcgggtggactggtggtggaactagtggtggaggaactagcggtggaggaactagcggtgatggtccgaaacctggaggtggagacaaacccgttcccaaagatccaatagaattaatggacaaaagtaggtttgttggttggagagaaggagctaattgcttaagtctttgcaaagaaacactaaaaaaatatggattatccaattacggaagtagcttaaatgtttttaagctagttgattctgcaaatggattattaacaaactggggaaatgatccagctcaaaactacaaaaatgcaattgaatgtatcgataaacatctcaatgcaaaacgagttatcatagtaggagttgattatgatctcgatttaaatccaaacatcgacggtacagaccattttattgtagttacaggaagaggatatgatacttcacgacaacagtattactatacatttatggataatgcaacttccaactctgatgatggatgtagcaacattaatcgcctttactacaaaactgaaaatttaaagctagagggaagcacaaaggttgctaacagatattatactgtaactcaagtaagacccaacgacggtgggaaatatgatacaacatctttataatataaaaatgtataacctagaacgaaacgatagagtccacttttaccgtggactctatcatcatctataaataataatcaaccatgaaaaaagtagcaattttaattatattaataatggcaagcggactatctatgtatggccaaaacagctacaaagtcacttctttagtgaagctatcggatataaaagaaaagaacttgcaacgtgtattctatgttttttcaaaaaatgagttcctaaagctacccatcaattatgatatttcattctttgtttaccaagacaacaacagtatctctcgtgatgattttgaacatacgagagcagtaactcaaggtacatcttatagaataagcaattctccattctatgctaatcttgacaaaagagacaagagacctcccattgaaacagttctttctctcattgaagatactaatggaaaatatatcatgggaatagtcagaacttggtcagctcttcacgatatggataaacattggttagttacattcaattttgcaggagcaatcattgactacattcccatttgtgaatggcctggaacatgcagcaaagctagaaccatggaagcacaaatcaataaagattttacggtgaatgttcaacagttgaactttcctgaaaataattacatcattcagttcgatagtataaaaagaaattttatacacctagataacctgaaagggcaacgtatagatactaaatatcagataatgccggatggaaagtttaaaaaactggaagaggcatattatcaaccgcaaatctacactccggacatgttgaagagcaatgaaaccctcattcgatatagaagagaaaatattaaagaaaagaaaatatttcaacaataaagactatgaaaaacagtttaagaatcccacgaattatccaccaaacatggaaaacaaaagatgtaccttctcctcttgaccaactgccacaaacatggaaagaatatctcccgaattgggaatatatcctatggacagatgaaatgaacagggaatttgtctgcaaacatttccctgatttcctggagaagtatgatacatatccttgtaacatacaaagagcagacgctatacgctatcttctcttgaaagtttatggaggattgtacgtagacatggatttcgagtgcctcgaaaatattgagttcttactagaaggatcggattttatcgtaggtaaggaacccgactggcatgctaaacgctttggttttgaatatatcatttgcaacgctttcatggcgtcaacacccgataatgattttatcaactttgtatgccaaaggttaatcaatcattccggtgggaaagttgttaataacggatttgatatactggattccacaggccctttcttgctaacgcatgcattcaacgcatttccacataaagaagacatacgtatcctcgaatcaaagacaatatatcctatcggacaatgggaggtagagaaaataaaaaacaaccagattcctaaagaaatggaagagcgtatcaatcaggctcatgccatacactatttctttggtacctggtttggtaagtaacctttaaaaataaaataaataatgatcccaaagaatatacaccttatctttctacgcaaagatgaaccgttccccgaactattcgagaaatgcaaacaagaaatacaagtcaatcatccggactggaatatccgcctatataataaggatgatgcacaggatatattaaatcaagatttacctgaatacatcgaagcctataatgcattctatcacaatgtacaaaaagcagacttcttaagattagcccttgtatacctctatggaggattctatatggatttagatatgttaagtttaaagccacttgatgagttgagaaagtataatttggttttaggagaagagaaaattgtctgccaggcagagcaagaagccttgaatttaagatatcgacttcgaatagccaactatatgttcggtggaatccctaaacatccttttttacacagaataatggatgaaatggcagaaagagccacaataatcttaaaatcgcaacaggagattttagacataacaggtcccggcctactaacagacacatattgggataactatggaatgtatacagacatcacattattaagaaatacagataaaaggtgcaggcaaccttatcacaatgaaatctcatgccactttggagattatgcagctcatctgcatgccgggacatggagaacgggaatttgagtttatataaccaagttatgcaagaaaagctattttatcaacaaacactaaaagaatcattgtaaatttcttttctacatcaactgcaataaacgtaatgaccgggaaacaaatggagagcatatcatgggagttattaccgcaacatctaaaaaacatgataagataaaatggtcagagagtattgatactggtttgtcattgccgacacctgctgtactttcattgttcacaaacatatattatagaatgataatcagctacttatcttacaccctaattatccatagagtactctgaacagacaaaatatatttgcctacatattggcactacaaaggacagctaatcattcgaaatccgctatatttggacacgttttgaatgacaaaaagcttcttgagcaatcattctttatgactgacaagatgcagcccgaaccggacaagaatactttctagatgtaaagtggtgccaaaaaggtaaatatccgtgccatttccataaagaagtactattctaaaccctaatagaattaattccattagttttgtataaatttgtaaactactaaacttgttaaaaataaaccatgatgaacaaaaaagtaattgccgtagccctcgcccttgccttagcaggaggaagctatgcacaagatgacaccgcgaagaaaaaggtgaaagcctatatggtgtcggacgcccacctcgacacccagtggaactgggacatccagacaacaatcaacgaatatgtctggaataccattagtcagaacttatttctgctaaagaaatatcccgaatacgttttcaactttgaagggggagtgaagtatgcgtggatgaaggaatactatcccgaacagtatgaagagatgaagaaattcatcgaggaaggccgctggcatatcgccggaagtagctgggaagcaagtgatgtgttggttccttccgtcgaagcctccatccgtaacatcatgctcggacagacgtactaccggcaagagttcggaaaagaaggaacggatatcttcctgccggactgcttcggattcggatggacgcttcccaccattgccgcacactgcggactgatcggcttctcttcacagaaactggactggcgtaatcatcccttctacggaaagagcaagcatccgtttaccatcggactctggaagggcattgacggcaaacaagtaatgctagcccacggatatgactacggacgcaaatggaacaacgaagatctctcgaagaataaagatctggaaaaattagcccaacgtactccgctcaatacggtctaccgctattatggaacaggggacatcggtggttctcctactctgggttcggtacgttctgtagaacagggaatcaaaggtgatggtccggtagaggtgatcagtgctaccagcgatcagttgttcaaagattatctgccgttcaacaatcacccggaactgccggtatttgacggagagttattgatggatgttcacggaacaggttgctatacttcgcaggcagccatgaagctgtacaaccggcaaaacgaacagttgggcgatgcagcagaaagagcggcggtcgctgccgaatggctgggtaccgccagctatccgcaacacacgctgacggaggcatggaaacgtttcatcttccatcaattccatgatgacctgacgggaacgagtatcccccgtgcctatgagttctcatggaacgatgaactgatctctctgaaacaattctcacaagtactgacttcttccgtcaacgccattgccggacagatggatacacgcgtgaaaggaacgcctgtcgttctttataatgcaaacgctttcccggtatcggacttgacagagatcatcctcgaacagcctaaaaccccgaaaggcttcactgtatacaatgcacaaggcaagaaagtcgcttcgcaaatgatcggttacgagaacggacgtgctcacatcctggttgcagcgtcactgcccgcaaacagttatgcagtgtacgatgtccgcaccggaggatctgaaaaaacgatctctccttcagccgcctcagccatcgaaaactccgtctacaaaatcacactggataaaaacggagatatcatctcactgaccgacaagcgcaacaacaaagaactcgtaaaagatggaaaagcgattcgcctggcactcttcaccgaaaacaagtcgtacgcatggcctgcatgggaaatcctgaaagagaccatcgaccgtgaacctgtctccatcacagacggcgcaaagatcactttagtggaaaacggcgcactccgtaaagcactctgcattgagaagaagtatggcaaatcgctcttcaagcaatacatccgcctctacgaaggcagccgtgccgaccgcatagatttctataacgaaatagactggcagtcaacaaacacgctgctgaaagcagagtttcctctgaatatagaaaatgaaaaggctacttacgatctgggaatcggcagcgtggaaagaggcaataatgtacagaccgcttacgaagtatatgcgcagcaatgggcagacctgaccgataagaacaacagctacggtgtatcgatcctaaatgacagtaaatatggctgggataaaccggataacaacacgatccgtctgactcttctccatacaccggaaacaaaaggaaattacgcttatcaggatcaccaggacttcggcttccatacatttacttatagcctcacaggacataacggagcacttgacaaacccgccaccgccatcaaagctgaaattctgaatcagccgatcaaagccttcagcagtccgaaacatgccggaacactaggtaaagaatttgcttttgtacgttcaagcaacgatcaagtcgttatcaaagcgctgaaaaaagcggaagtatccgatgaatatgtagtacgtgtatatgaaacaggaggcgcagctccgcaacaggcagccatcaccttcgccggtgaaatagagaaggcagtacttgcagacggtacggaaaaagagatcggcagtgctgacttcaacaagaaccagctgaatgtatccatcgctccctacagcatacagacatttaaagtgaagctgaagaaaaaagctgatcttcaagctccggcatgcgcttatcttcctttggactatgatcgcagatgtttcagttggaatgctttccgcaaagaagggaacttcgaatcgggcaacagctatgcagcagaacttctccccgactccatcctgaaagccgacggcattcctttccgcttgggagagaaagaaattgccaatggtttgacttgcaaaggcaatgtacttcagttgccaaccggacattcttacaaccgtatctatttcctggcagcctctgccggtgaagatgcagttgctaccttcagcaccggtaacaactcacaggaaatcaccgtaccttcctataccggttttatcggtcagtgggagcatctgggacatacggaaggcttcctgaaagatgcagaaatcgcttatgtcggcactcaccgtcatgcttctgacaaagatgaggcttatgagtttacgtatatgttcaagtttggcatggatattcctaaaggagcgactacggttactttgccggatcatgcagatatcgtattatttgccgcaacgctggttaatgagaagtatccggcagtaactccggcctcggaattgttccgcacagccttgaaagcagacaatggagaagaagcgacgactaaaacaaacctgttgaaacaagccaaactaatcaaatgttccggtgaaaccaacgaaaaagaagttgcaagatatgccgtagacggtgatgtgaagacgaaatggtgtgatacaagcacggctcccaactacattgacttcgacttcggaaaggaacagacgatccgtggatggaagttggtaaatgccggaaatgaaggcagcgtctttatcactcatacctgcttcttacaaggcagaaacagtccggacgaagaatggaaaacgattgatgaactgagtgataacaagaaaaacacggtagttcgccagtttaagccgacttcggtacgttacgtcagactgctggttacacaatctacacaaaacaacagtctgaaggctgcaagaatctacgagttggaggtttattgataaaccgaaaataaaacagaagtaatatctcacaaacaaaaagaaggcgtatcaaaagtcaaaagtaactaaaccctcctccttcaggaaggaggagtacccgtaggaggggagtttagttactactgacttttgatacgccttcttttttcatctccatatctgtcattgacaataagaaaacgccttcaaatatatgcttccgcaaacacttgaaggcgttcatcatcctaaccaatacctatcctaaaaactattttttacctatttattcaaaacgatcggcctattggcagaagctttaccaaaattcttggcaggctttttgcccatctcaaattttaaagtactgccgttaattatatcatcgtacgtaatataacttttatgataaggtttgccattcagataaaccttctgaatatagatattatctttactattattcggtgcttcaacagtaaacactttaccaccacgcactttcacttctatctttttaaaacgaggactgccgaatgcaaacacaccgtcagacggattcacctgatagaatcccatagcagaaaggagataccatgcagacatttgtccacagtcttcattaccgatgataccgtccggctgatctgtgtagaagtcgctcatgatgaaacgaaccttttccgctgttttccactgttcgccggcataggtatagagataggctatgtgatggctcggctcattgccatgcgcatattgtccgatcagaccggtgatatcactggaagcaccttcacccatactgtcattgttcgtaaagaagctgtcgagcttcgatgtaaacggcttgtcaccgccaaacaggctgatcaatccatacggatcttgcggagcgaagaatgtatattgccatccgttgccctcacagaaatcgccgactccgtgaatagaacgtgccggatcgtacggagtacgccatgaaccgtcttccagtttcggacggatgaaatggatagaagaatcgaaatagttcttatagtaatgggcacgcttcgagaatgtctcataatcagccgtcttccccatcttttgtgccatagcggcgattccccagtcatctactgcatattccatagcgatggaagtagcttcgtggattttatcagcagggatatatcctttggccatcacgtaaggaactccgttctgcctttcataagttgctgtcgctttcatagccgtcaaggcttcttccgcatcaaatccggtaaatcctttcagataagcatctgcaatcaccggaacagagctatatcccggcatacaatttgtttcgccgctcatcaaaggccagataggaagtttatcctgttgccgataaatggaaagcattgaattaattacattgtccaccatttcgggctgaatgatagtcatcagaggattcaaggcgcgataagtatcccaaagggagagagtggtataattcgctttcttcgggtctgtgtaaatcatatcattcatcccccgatactcaccattgacatcacaatacaatgtaggagcgatcatggtatgatagtgtgcggtataaaacacacgtttggcagcctcatcgtctgattctacggtcatcttatccaactgtttgttccagcggtcactgctcatcttcaccaccttgtcgaagtcccagtgagaaagttccgcttgcaggttcatcgctgcattgtcacaacttacggaagaaatagccactttaatctttacttctttcacattgccgaaagtaagcacacttttcaccgattctactttcagttgatcccaaagtttgggggtattatcgtcataagccgtaaatttctcgatcttctgatcgctcttcagcacaaagtatacttttcgcgacgggctccaccctctgacataccgataaccttccactgtatagtcatctactttgcgaatatagctgtcgtatgcattggaaccgtttccttcacgcaggtcaatcagtatagaggccggttttccttcgggataggtataacgatgaaaacctacccggtcagtagctgtcagttcggccttgatattgtatctgtccagaattaaagaataatattccggacgggctatctcattgtcatgtgagtatttcgacgcataaccgtcacgtatatcatcctggttacctctgggagtacggatttcattgagaggcataatcagaatatcccccagatcggtacatcccgtaccgcttaaatgagtatgagaaaaaccaatcagaatactgtcggaataatgatatcccgaacaccagtcccagcctttatgaatattgttgggtccgagttgcaccatgccgtacggaacactcgttccgacaaatacatgcccgtgaaaaccggagccgatataaggatcgacatactgtaacaatccctcactctttgaatagtcctgttttgccactccgctcgttgccagacctaaaaagcaggaagcagccattaaaagtttaaatgcgttcatctgtatttttcttgttaattcgaaattgtttcatggtaggatttacttcatgaattatagttttcatgatgcaaatataaactctatttcgatactatcaggctgtcgccagagtttaccgaatggatggcagggatatttactcttttggcaaaagaaaaaggacttgcactgactaaagcagttcaaatcctttccataaatttccttcgggaagaggagcttcgagctctatcagctcttttgagacgggatggatgaatcgtaccttccgcgcatgcaggcaaatactgccatcgggattggaacgcggagcgccatatttaaggtctcctttaatgggacatcccatttttgccaactggcaacgaatctgatgatgacgtccggttttcaagtctacttcaagcagatagtaattctccgaatgtccgatcagccgataattcagaatcgctttcttgctattcggcacttctttgtcataagcaaaactcttgttctgcttctcgttacgtgccagataatgcaccaattcaccttccggctctttgggggcattctttactactgcccagtaagtctttttcacttcactggtacggaacatctcgttcagacgagtgagtgccttactcgttttggcaaaaataacaaggccgcttacggggcggtccagccggtgtgtcacaccgatgaaaacatttccgggtttctgatacttctctttcaggtactgcttcacagtttccgaaagcggtgtatcgcccgtcttgtctgcctggacaatctcggaagcggtcttgttgactacaattatatggttgtcttcgtatacgacagtcatactgttcgattacatattcataccaccatctacctgaatcacctgacctgatacgtaagaagacatatctgatgccaggaaggtagcgatgtttgccacatcttcaggagtaccgccacgacgcaaaggaattttctttgcccattcagctctcacttcgtcagaaagagcagcagtcatatctgtcaggatgaatcccggagcaatggcgttggcacggatgccacgagagcccagttcttgtgcgatagacttggccaatgcaatcatgccggctttggaagcagcatagttagcctgtcccgcattaccgtgaacacccactacagatgccatgttgataatgctaccagctttctgacgcatcataacaggtgtacaagcgtggatgaagttaaatgcagacttcaggttcacattgattaccatatcccattgttgttcgctcatacgcatcatcagaccgtcacgagtgataccggcattgttcaccagaatatcgatacgtccgaagtccttatggatttcttctacgacctttgcagtatcttcaaagttagcagcgttagaagcataacctttggctttcacacccattgcttccagttctacccttgttttttctgcattttcgtcaatgaccaggtcagtaaatgcaatgtttgcaccttcggcagcaaacttcagagcgatagccttgccaataccacgggcggcaccggttacaatggctgtttttccgtctaataatcccatactaaaagttatttaattaaatttctgttctatgcagtgcgccaaacacaatgttggacacatatttatttcttgtttcttcgtccagatgagctcctatatgcccacggatataaggaacttcaattcccttcacacagtaatgtatcaaatcggcagtcatctccacatcatcaatgtgaaacactcctttcgcctgtccctccaacaacacagctttaaaaatctggatttctttcgcatcaaatttctttcgcactttttctacccgccatatatcacggaagaaataagcacgcagggttccattccgataaacgacctcctttactgcatccaatcgggtatatatcagttccaacagtttgtcgtccggcgaaatgtttttatcagccaccctcttcatcatatccgacaagatatccaattccgattctacaacagccaaatagatttcatccttacttttaaaataggtataaagcgttcttctaccttttttcgaagtgagggcgatatcattcatcgtagtgttctccacccccatctttgcaaaaagctggcgggcaacgtctactaacttggctttcgtttttgatacggtcataggttatacaaattgcacattgctgaatattttgagcaaaagtaattcttttctttagaccacacaagaaaacgcacagaatattaacatttgtatattaataggtactaaaaaaagttccatcaatacctctctcattttcagcacaatatagataattcgatcttttttctaaaaaataattggagaataatttgttttattcaagaaaagccgtacctttgcacccgttaaacatcgcggagtggagcagttggtagctcgttgggctcataacccaaaggtcattcgttcgagtcggatctccgcaacttactaaagaatcgctttttaagcggttctttttttatctctctccggtaagattctactgattacagttcctttattcacaaccccaatcttatattaaccacgttatcaacaaagttattaacaggttaattaattagtaacaaacaaattaactatataagagactcatttttaaacaagcaggatgtgacttgttcacaacctcaaaaagcaaaataagaatcacccgaatacaaaaaagatactacctcaaaaatcagtagtatctccttaattcttcttccgaaaggaagtacatccattcattacaatctatattacccttgtcttttttgccggttctgacgcccttctttcatctgtttctcacgttcagcctgttttttcacatagctatcgtattgttctttagtcataatcttcttcaactgggcatcataatcttcacgggacttcttcatttccgccatcttcttttcccgctcttccttagtcatcttggcagctttattatctttcgaacgtccgccctgattagcagccatcttttgcacccatgtaaggttgacatcctgtaattgttgcttttgatcttcattcaaagagtattctttcaccatacgctctgtcatacgttccgcacgggttttcggatccatctgttgtcttccaccctggcgatttccttgtgccattgccacaccactcatcagtagcaaagctaccatccaaaatacgattcttttcatttcttttttcttttatagttaatctgataataaaccgattgcatcattgcaatattatatttgaccagattaaaacggaaaggttaaatcacatcgaggagattaacaataaataactttatgtttattcttcccgaccgaacgagcggtattcaagcggagtaagcccggtacgttttttgaaaaaggagaagaaatattcggtagactgaaaacccagaaaaaaagaaatttcttttactgactgggaagttcccaccaacatttgcttggctttacgaagtttcagttcctgaaaatatttggcgggtgcatagccggtatattccttaaaaaccctgcggaaccatgagtaactaatattcagtctcatcgccagttcctccggatcaatattgccggatacattttcattcataagtatctttgcctgctcgatcttctgatcgacatcactcatctcgaagactttattcttggaaattgaaagaatcataccgatcatatgaagcacgattccggaaaggtattgctgggcagatattttatccgcttccgccacttccaaagcgcgggaaaacaaagataccagttcttcattaataccgacttccaatatctgtctttcctgggaaagaaaggcatcgcccacaatcgtatcaatcgccggaccttcaaaaccaatgtaatattccgtccatccggtctgccgcaatggataataagtatgccactgtccgggaaacaataccatcagccgacctttacaaacttgtctttcaggagtagaatcggaagaaaacaaaccgcgcccttttgtaatatagaccaattgatattcccgcaagactcttcctttttcggcattgaaatagtaaccggacggatgttccttcagtggataaggagaatcgggagggatagactgatagccgaccgtattcacccacagaccgaatttgcggtccatgtcattaactatcaagtatttaaattctaatcccagattattatcctcagtcatacaggcgtgttttcatacaattgaattgaacaaaagtaggaattattttcaaaaaacacacgctaaacagtaaaaaaacatccggagcacctgttcagatcctccggatgcttataaaaaacaaaccttatacaattaaaatcagaatgctttccgatataatacttcaatttccgctactgacgtaggacgcggattaccacctgtacaaacgtcattgaatgcagccaccgccaatgccggaatatcctcttccttcacattgatttcatgcaatttctgtgggataccgatactcagagaaagcgctttcactgcctcgatagccgccttcacaccttcagcttctgtcataccgtctgtattgacgcccatcgccttggcaatatggatatatttcggagcagccggagactctgcattgtactccataacataaggtaacaacagcgcattggcaacgccgtgaggagtatcatagaaagcgcccaacgggtgagccatggaatgtacgattcccaaacctacattggagaatcccataccggcaatatattgagcttgcgacattgcttcgcgggcaactgtgtctttaccgttatctaccgctgctttcaagttctgagcaatcatttcaatggctttcagttcaaacatatcgctcattgcccatgcgcccggagtaatataactttcgatggcgtgagtcaacgcatccatacctgtagcggcagtcaatcctttcggcatggaatacatcagttccggatctacaatagctacagcagggatatcgttcgggtctacacataccattttcttgcgtgcgtcttcgtcaatgatcacataattaatagtcacttcggcagcagttccggcagtggtaggcaatgcaaaggtaggaacagccttatgtttggtatcagccacaccttccagagatttcacatcggcaaaatccgggttattcacaacaataccaatcccctttgccgtatcgatagaagaaccgccacccaaagctacgataaagtctgcaccggaagccttataggcagccacaccattctgcacattagcaatggtagggttagcctttacatcactataaagttcatacggaatatgattgtcatcaaatactttaatgatttcggctgcaacaccaaatttgataaggtctttatctgttacgaaaaaggctttcttaaagccacgtctggctgcttccacagcaattacactccggcatcctgcaccgaaataagaggtctcattcagaataatgcgattcatagttgtgtcataattttaaagttaccgcaacattctccattggtagaaaatgctgcggtcgctaaagtagataaattcagtgattaatacaagtattatttaggaagattgaaagcaacggacatttctttcatttgttcctgactcataccatccggttcgaagcccatattctttgcagcaatatagatcagcgccgacttattcagcacgtcaatctggtcaaaagcctgcatggcatcgcagtctacggcaaaaacaccgtgtttttcccacatgactacatcgtagtcctgcaattccttgatagtagcttccgccagttctaccgagctaggcaatttataaggaatgatacccagacctctcggacagaatgccttcgtttcgggaatcatactccataacagattggttgccacatctttctgaaggaacttctcgcaatgagtcatggcaatcagttcgatcgggtgagtatggacagatgctttataaggagaattcttgctcagcaaatcattgtgtacgctcaggtgggaaggcagttccgaagtcggcgccaccgcttcgtcggcaatgattacatagctggcgcaatcatccagaatgcggatcaccgaaccattttccatcggccagcgagccagatcacgcatacgtttgttggttcctttgcaataaaagtaacatcctttcagataaggcaatgtaacgccaatggattttacttcgctaatcggttccatccgacggatttcatcgtctacaaactctgtgatatttacggtgatattaccaccgttacgttcagcccatcctttttgccacaagtatccggcaacttcagctaccttgtttacttctttggcaagtgccggacgattttctaaaattgatttcatatctatttattattaaaacaagttcgggaataccaacgagaagatcaagactaccaaaccacagatcaatactgtgattgttttggcagatactcctttccactctttcaggatgattccccatacattactaaaggttacgttcagcgccatcaggatacaccatgagaaagccagcaacaccggactttccgtgaggaagctcttacccatctccagtccgaagaactgcatgtaccacagtacaccggccaacgcacagaagacgagattgttaccccatacctttcctttggcatagtcaccgacagacttattagctatattctgctgcaggcagtaagcggcatttgtcatgaatccgcctaaagtcacgaggaagataacaggaagacctgcataaagtccatccacaccacctgccaaagcagcttccttgataggagttccggcatccagtcccaaagcaaagcaagcactcatcacaccagcaagaagtgctaccagcaaacctttcgtcagtgcaaagtccttcacagcagcccgtttttcttcttcgctcatattctgcgcacgcaagccaccggcgtaaccgatgatagcaatacccgccagcgtaatacaaactcctagaagaagaatcagtccgttaccttcaaacagattggttccggcgaagatggcaggaaaaagggttccgaatccggcacaagtacctaatgcgatactttgtccgagcgcaacacccagataacgcatggagagtccgaaagtcaatccgcctattccccataatacaccataaaagatgctcattccagcacctccagctccccacaagtcgaacaaactgcctcctgcgggtatccccagcagtgatcccaggaacgggaacactaaccaggcaaacacaccttgtactaaccagaagctttcccagctccattccttcacctttttaataggtacataggaactggactggcaaaagctaccgatggctataatcaacaagcctattagaatatccatcacttatcgtttagaagttacttccgcttcgtacttttcgatttctgcaatgaaatcttcgcctaccggaacgttgttcttcaagcagaacatatcccatactgcattccatggaagagctttctcttcttcgagcagagccagacgctggaatccctgtccgttagcttcgtattcacgcagcttggcaatcggttcgagcaaagcccgtgtcatacatttctgagcagcacggctaccgataacataagcaccgatacggttgatagaagcatcgaaatagtcgagaccgtagtgtacgcgttccaatgcaccgcaacgaacaatttcactgaacagttccattgtaggatcatccataatggttacgtggtcggaatcccaacgaaccggacggcttacgtgcagcatcagttcgggcacataaagcaaaagagaagatactttgtcagcaacactttcagtcggatggaagtgaccggtatccaaagtcaccatcttgttacgggatgcgccataaccgatgtagaagtcattggaacctactgtatagctttccagaccgataccgaatacttttgattcaatacagtctttcatgtttttatattcagtggcaaatatctgatccagagaatctttcaacaatgcacgatatttcatgcggtttacagtgatatccttgcttccgtcatgtacccaaagattcatgatacacgggtcaccctgcgccttacccatttcttcggcaacggcacgacaacgtttggtatgctcaatccagaactgacgaatgccctcatccggattagacagtgacaaatcgcctgatttcggatgtgagaatgaagtagagttaaaatcgagtttcatgttatgctctttaccccattcaatccagctcttgaaatgttcaggctctacctgatcgcggtctaccactttaccttgaaaatccccatagatttcgtgcaagttcaaacggtgtgtacccggaatataagaagcggctttcagaatgtcagcacgcagttcatcaatattgcgagctttgcccggataattaccggttgcctgaatacctccgctcagtgcacctgcctgcacttcaaaacccgttacatcatcagcctgccagcaatgaagtgacaagtggaagtcctgcatggttttcagtaccttttcagtatctacacctactgctgcatagcgttcaacagcaatctcatacgctttctgaatcatttcttcttttttcatgatattctattattaaaagttaatattattctgtcggttatttcttaattctccggaatttatcgaacgcagtttttaaaatggatataagccgcatcccaggctgccatatcctgtgggtgataagtcttcaacggaattgaacggcttatcaactgacgcataccggcaacatccgtcgcctctcccaccgtcattacctgaatcatgacattaccgatagctgttgcctcagacggtcctgccacaaccggaatgccgatagcattagcagtaaactgattcaacaagtcattacggctacctccaccgatcacatgcagagtttcgataggacgaggagaaagcgcacgcaagttttccaacacctgacggtaacgcaaagccagactctcaaagatacaacgtactatttgtccacgttgctcaggaaccggctgcccagtagtccggcaatattcacgaatggcctgttccatatccgcaggatttgcaaaacagtcgtcatccggattgattaaactacggaatggttcacacgaatccgcttcggtaattaattccggatagcttgtatctccccaattcagacggcaacgttccagcaaccacattccacaaatattcttcaaaaggcgaattgtgccttctacgccaccttcattcgtaaagttcaaagcttctgtttcagctgtaatcaccggtgcatctgtttccacccccatcagcgaccaagtaccgctactcaaatatgcaaaattacgatcaagtgcgggaacagctgctacagcagatccggtatcatgtccggccaccgcaatcacaggaattgcccccaatcctgttatcttttgcacttcttcagtcaatgttcctatcttctcacccgggaagacaaaacgaccgaaattctcttctttcagtccgactgctttcagcaactccggttccagacgttgcgtatgtgcattcactaattgggcagtggaagcaatggtatattcagttaccatcttcccggtcagcatataactcaacgcatccggcataaacagcactttgtctgctgcctccaatgcactgtcatgattgcgacgcaaagtatctaattggaaaagtgaattaaaattcattacctgaataccagttttaccatatacctcgctacgagagatacgagagaaaaaggcttccggtgctcctaccgtatgcggatcacgatatgcataaggctggcgaagcaggtttccatcttttccaagaaggacgaaatctactccccatgtatctataccgatagaggcaatagattctccacggtgagctaccaatttcaatccgtcgataatgtgacggtataatgcataaatatcccaatagaaatgtccacccacctcgatcaagtggttaggaaaacgattaatctcctccagatttaatccgccttcaataaaagagcctaagattgtacggccgcttgttgcgcccaggtcgactgcaaaaaagttctgtttcatggtattttgtctatatatttaaggtatccatttacctacattgcaaagataggcggttccttcctccttttccttacgcattttgatagaaaggatgtgcattttgacacaaatctgcatagccaaaccttacatcagtataaattttactttttatgcaaaaaaagcatgatttatgcatgttttctccaaaataatgcataattttgcgccattcttagaataattatacaatgaagaagaaagcaaatcggttagacgccatcaaaatgattatctcaagcaaggaggtaggctcgcaggaagaactactgcaagagctgaaccgtgaaggcttcgaactgacacaagccaccctctcccgcgacttgaaacaactgaaagtagccaaagctgccagtatgaacggcaagtatgtatatgtattgccgaataacatcatgtataaacgttccactgaccagagtgccggtgagatgttgcgcaacaatggatttatctccctacagttttccggcaatatagctgttatccgtacccgtcccggttacgccagcagcatggcttatgatatcgacaacaatgagttcagcgagattctgggaaccattgccggtgacgataccatcatgctggttctgcgtgaaggagtagccacaagcaaagtacgtcagcttttgtcgctcatcattccgaatatcgaataactatacctatattatatataaagaaatggacactcaacaaatagatgttatggtagccgacgcctcacatgaggtttacgttgacactattttggaaactatcagaaatgctgctgccgtacgaggaaccggaatcgcagagcgcacacacgaatacgtagcgactaaaatgaaagagggcaaagcaataatcgcgctctgtggcgacacattcgcaggtttcacctatatcgaatcatggggaaacaaacaatacgtagcaacctccggtctgattgtacatcccgattttcgcggattaggattggcaaagcgcatcaaacaagcatctttccaactggcacgtctccgatggccgaaagctaagattttcagtctgacatccggagccgcagtgatgaaaatgaacaccgaactaggatatgtccctgtcactttcaatgaactgacagacgacgaggctttctggaaaggatgcgaaggctgcaccaaccacgatatactggtagctaaaaaccgtaagttctgcatctgcacagccatgctgtacgatccgacagacccgcggaacataaaaaaagaacaagaaagaaataacatttaatatatacagcactatggaagaaaagaagaaaaaagtagtggtggcattcagcggcggactggacacatcgttcaccgtcatgtacctcgctaaagaaaaaggttacgaagtatatgcagcttgtgccaatacgggcggtttcagcgaagaacagctgaagacaaacgaagaaaacgcctacaaactgggagcagtgaaatatgtaacattggacgttactcaggaatactacgaaaagagtctgaaatatatggttttcggaaatgtgctgcgtaatggtacttacccgatctctgtcagctcggaacgtatcttccaggcattggccatcgcacgttatgccaacgaaatcggtgcggatgccattgcccacggttctaccggagcaggtaacgaccagattcgttttgacatgactttccttgtactggctccgaatgtagaaatcatcacgctgacccgtgatatggcattaagccgtcaggaagaaatcgactatctgaacaaacatggtttcagtgcagactttaccaagctgaaatactcttataacgtaggtttgtggggtacatccatctgtggtggcgaaatcctcgactccgcacagggattaccggaaacagcctatctgaaacatgtggaaaaagaaggcagcgaacaactccgtctcactttcgaaaagggagaactgaaagctgtcaatgacgaaacattcgatgatccgatccaagcgatccagaaggtagaagagatcggtgccgcatacggtatcggacgtgatatgcacgtgggcgatacgattatcggcatcaaaggccgtgtaggtttcgaggctgccgctccgatgttgattatcggcgctcaccgcttcctcgaaaaatatacattgagcaaatggcagcaatactggaaagatcaggtggccaactggtacggaatgttcctccacgaaagccagtatctcgaaccggtgatgcgtgacatcgaagccatgcttcaggaaagccagcgtaacgttaacggtacggcaatcctcgagctccgcccgctttctttctctaccgtcggtgtagaatcggaagacgacctcgtgaaaacgaagttcggcgaatatggtgaaatgcagaagggctggacagccgaagatgctaagggctttattaaggtaacttctactccgctgcgtgtttactacaataaccataaagacgaagagatatgattaaagcaggaatcattggtggcgcaggatatacagcaggcgaattaatccgtctgctgctcaaccatccggaaactgaaatcgtattcatcaacagcagcagtaatgccggaaaccgaatcaccgacgtacacgaaggactatacggagaaaccgacctgagatttaccgaccagttgcctctggacgcaatagatgtactattcttctgtaccgctcatggtgacacgaagaaattcatggaaagccacaacgtgccggaagatttgaaaatcatcgacctctcgatggattatcgcatcaagagtgacgatcatgacttcatctacggtctgccggaactgaaccgtcgtgctacctgtacggcgaagcacgtagccaaccccggttgttttgctacctgcatccagttaggtttgcttccgctagccaaaaatctgatgttgacaggcgatatttcggtcaatgccatcaccggaagtaccggtgccggcgtaaagcccggcgctactagtcatttcagctggcgtaacaataacatcagtatatacaaggccttcgatcatcagcacgtgccggaaatcaagcaatcactgaagcagttgcagaacagcttcgattcagagatcgactttattccttatcggggagatttcccgcgcggcatctttgccactcttgtcgtaaaaacgaaagttgcactcgaagaaatcgttcgcatgtatgaggaatattatgcaaaagactccttcgtgcatattgtagataagaatatagacttgaaacaagtcgtaaataccaataaatgtctgatacatctggagaaacatggtgacaaattactgattatctcctgtatcgacaacttgctgaagggtgccagcggacaagcagttcataacatgaacctgatgttcaacctggaagaaaccgtaggattacggctgaaaccttccgctttctaaaaacagaagaattatgaaattattcgacgtatatcctttatatgacatcaatatagtcaaaggacaaggctgtaaggtatgggatgaaaacggtacggaatatctggacctctacggaggccatgccgtcatctccatcggacacgcgcatccccactatgtggagatgatcagcaatcaggtagcaacccttggtttctattcaaactcggtgatcaataagctgcagcaacaagtagccgaacgattgggaaagatttccggttatgaagactactcgctgtttctgatcaacagcggagccgaagccaatgaaaacgcgctgaagctggcttctttctataacggacgcaccaaagtcatttctttcagcaaagccttccacggacgtacatcccttgcagtggaggctacgaacaaccccaccatcattgctccgatcaacaacaacggtcatgtgacctatctccctctgaatgacatcgaagcgatgaagcaggaactggcgaaaggtgacgtatgcgctgttatcatcgaaggaatacaaggagtgggcggtatcaaaataccgactaccgaatttatgcaggaacttcgcaaggtttgtaccgaaaccggaacgattctggttctggacgaaatccagagtggatacggccgtagcggaaaattctttgcccatcaatataaccatatccagccagacatcatcaccgtagccaaaggcatcggaaacggattcccgatggcaggtgtactgatcagcccgatgttcaagcccgtctacggacaactgggaactacattcggcggaaatcacctggcctgctcggcagctcttgccgtaatggacgtcatcgaacaggacaatctggtagaaaatgcaaaagcagtcggcgactacctgctggaagaactcaagaaattcccgcaaatcaaagaagtgcgcggacgcggactgatgatcggactcgaatttgaagaaccgatcaaggaattgcgcagccgcctcatctacgacgaacacgtatttacgggagccagcgggacaaatgtactccgcttattgccccctctctgcctcagcatggaggaagcggacgagttccttgcccgtttcaaaagagtactctaactgatatttgattaataaacagcgaacaaaaaagcagcctcgaacagaaaaacagttcttattcaggctgctttttgttttttcgcaatttaccgttacctttgtctgtaagaatacattaaaaaagaagcgcatatgaaaatagctattatcggtgcaggaaacatgggtggttctatagcccgcggcctggcaaaaggaagtctgatagcagactcagatatcattgtatccaaccccagcgcaggcaaactggagaaactgaaagaagaatttccgggcatttccaccactctgagcaatacggaagcggcaacgggagcagatgttgtcattctcgccgtgaagccctggtttgtggagtccgtcatgcgcgagctgaagctgaagagcaaacagacgctcgtatccgtagcggcaggtatcagttttgaagaactcgcacactttgtgatagcaccggagatgccgatgttccgcctgattccgaacactgccatcagcgaactggaaagtatgacgcttatcgcggcacgcaacacgaacgatgaacagaaccagtttatgctccgcctgttcaacgaaatgggaatggccatgctcattcccgaagataagatagccgccaccacggcactgacttcctgcggcatcgcttacgtattgaaatacatccaggcagccatgcaggccggcatcgaaatgggcatccgtcccaaagatgcgatggaaatggtagcccagtccgtcaagggagccgccgcattaattctgaacaatgacacccaccccagcgtagaaatcgacaaagtgactactccgggcggaattacgatcaagggaatcaacgaactggaacacaacggatttacctccgccgtcatcaaagcgatgaaagcatccaaataataccgcaaaattattaataatcaaaaaacaaccacttgtatgaatgaccaaattaaacagatcgcagaacgccttcgcggattacgtgacgtactggaactaacgtctgaagatatcgcccgcgactgcgacatatctgccgaagaataccggctcgcagagacaggacaatacgacatttccgttagtatgctacaaaagatagcccgtacctacaacatcgcactggatgctttgatgtttggcgaagagccgaaaatgaacagctacttcgtgacccgtgctggcaaaggagtcagcatcgaacgtaccagggcttacaaataccagtcactggcgtcgggcttcatgaaccgcaccgccgatcctttcatcgtcacggtcgaaccgaagggagacgatgagccgatccattataaccaccacaacggacaggaattcaacctggtggttgaaggccgtatgcttatcaacatcgagggcaaggaaatcatcctgaaccaaggagacagtatttattttaattcaaaacttccacatggcatgaaagcgctcgatggcaaaacggtacgttttctggccgtaattatgtaataacgttatggtagaaagatttttagcacagactagctttgcctcacaagaggatttcatcaagaacctgaaaataaacgtaccggagaatttcaacttcggctacgacgtagtagatgcctgggctgccgaacaacccgacaagaacgctctgctctggaccaatgaccaaggcgaaagccgtcagttctccttcgccgacatgaaacgctatacggacatgacggcctcttacttccagagcctcggcatcggtcgcggagacatggtgatgctgattctgaagcgtcgctatgagttctggtacagcaccatcgccctgcataagctgggagcaacggtgatccccgccactcacctgctgacaaagaaagatatcatctatcgctgcaacgctgccgacatcaaaatgattgtggctgccggcgaaggaatcatactgcaacacatcaaagatgctcttcccgagtgtccgagcgtggaaaagctggtcagtgtaggtccggaagttccggaaggattcgaagatttccatcagggaatcgataacgctgcccctttcatccgcccgagacatgccaatacgaatgacgacatctcactgatgtacttcacttccggcactaccggcgaacctaaaatggtagcacatgactttacgtatccgttaggtcatatcgttacgggtagtttctggcacaatctggatgagaacagcctccacctcaccatcgccgataccggctggggaaaagccgtatggggaaaactctacggacaatggatcgccggagccaacattttcgtctatgaccacgaaaagttcacgcccgcagctattctggaaaagatacaggagtatcaggtgacttccctttgcgcacctccaaccatcttccgttttctgattcatgaagacctgactaaatatgacttgtcttcactgcggtattgcaccattgccggagaagcactgaaccctgccgtattcgaaaccttcaagaaactgacaggcatcaagctgatggaaggtttcggacagacggaaacgacactgacagttgccaccatgccttggatggaaccgaaaccgggaagcatgggactgcccaatccgcagtatgacgtagacctgatcgacagtgaaggtcgctccgtggaagccggagagcaaggacaaattgtgatccgtaccagcaaaggcaaacctctcggacttttcaaagagtactatcgggatgcggaacgtacacacgaggcttggcacgacggcatttactacacaggtgatgtagcatggaaagacgaagacggatacctttggtttgtaggacgtgcagacgacgtaatcaagagttccggttaccgtatcggcccgttcgaagtggaaagcgctttgatgacgcaccctgccgtcatagaatgtgctatcaccggagtacccgatgagattcgcggacaggtagttaaagctactatcgtattatccaaagactataaagcacgtgccggagaagaactgatcaaggaattgcagaaccacgtcaagaaggtgactgctccttataaatatccgcgtgtgattgagttcgttgacgaactgcccaagactatcagcggcaagattcgtcgcgtggaaattcgcgagaacgatgagaaataaggcataaaacccatttaatcgagtaggaggaaaacgaagtagaagttttcctcctactttcgttttccgacctctcacaccaccgtacgtgccgttcggcatacggcggttctcttaactgcgatgcaattgggtataaagaattatcattgacggataacccgccattacaagcttatctgttgtgattgctctatgcaatatccaactatccgcaatgcgccaatagcctttacgggtattcgcccattcccaagatttccgacgagggatgccacacttctgcaagctggcaaaacgtgtacgtacccgcttccaactcttccatatatacattctaagacgacgattgtaccacttcgctgttttgattataaaatctttcatatcggcataacgatagtatgtcagccaacctcggatgtattgcgtcaggtggagtttcagccaagcgtagccttgaccactactacggctggtcaggtgcttgatggtgcgtttgaacttggattgacttttcttatgaagattaagaccacatttacggtcggctcttcagtagaaggagtgtccaagatacttcttgccgcagatggaaccgacttctgtcttctctttgtttactttcaagaataacttcttttctataaactcggaaatactatcacggactcgctccgttgcccgaagactatggacaaggatcagacaatcatcggcatagcggacaaacgggtgccccctgcgttccaattcctggtccaactcattaagaagaatattgctcaatataggactcaatggaccaccttgggggacgccctcggcagtctccgcgtatttgtgagatactacaactcctgcattaaggtatttgtgtatcaaagatattacactgccgtccttgacggttcgggataagacctctatcagtttgctgtggttaacacggtcaaagaacttttccaaatccaaaccgatacagtagcgataaccttggtctgcatattcctgcaccttatgcagtgcatcgtgagcactacgatgagggcggaagccgaagctgttgtcactgaactgaggttcgtaaagcggtatcaacacttggctgattgcctgctgaacaaagcggtctaccactgtcgggatacctaatgggcgagttttaccgttgtctttcggaatttctaacctgcgcacaggggacggacgatacttccccctgcgtatcttttccaacaattcgtctttatggagggtaaggtatggcaacagttcgctcgtctccatcttatcgacacctcccactcctccattccttacgacttggcggtatgccgcattcaagttcgatggacttagaaggagttccaacagattgttttcttccaattgcacttccacaagctgctcatcttttatctccataaaagtctgcactcccacatactcgtcggatgctgtcctatccatttgtgggcagttcgttttactgattttccgcattgactctttcataaagtattaaatggtacttgtttgattaaaagttcagtccttcaccgactgccgatttttttaccttgtcggttactatgacctctgctgacttctcacggttcgttattactgcttgactgtatttatttatttttcctcgcccgtgagacctccccagttatggacatattctttccatcttatgtctgcttgatttactttggatgttccggacaactataggacttcgttttgtttagcaaacttatccacatccttaagccttaatatcaagtttctgtacgtcagaccagatatttgccgcaggcttccttcagattccacctcacgatggacacccttgccgttggctatatacttcccgttgtcagggcgctttagggacttacacccgttagaatatgttcgtgctgggcgaactaaaaaagccggctgcaaaggattgcagccggcttttcttttcactagtaagtatcggattctctaatcaattgataaagctccaaccatccgcttaatcattaggatgatagaaattgtattgttcactccatgcaggaattccggtaagcgttatatcattaccgttcgggctattatccttcaatacatttccttttccttcatcacacttccaatacccaatcaaaccatccgaatctccggatatctggcgtgacattccttcctgaatagcgttctctgtcaggcatttgctccaaagacgaatctgagctaattctacctgcatattccagccgaaactctgtgctaaagaaatattattgaatgtaaagtctcttgaatcggctttactattattcaatgtaccatctttatagagggaaatagtagatccgtcataagtataagcaatgtgataccatatatccggataccaaaattcctcactatcaaaatagtttccatccaactgacactgcaaacatggcgcaatcttttttgctccatccgcccaataacgcaataaaacgccattgaaagaaataggagccgaattgtctgcgaaaattaatcgtctgaaagcaatattggcaggacccacccaatctcctgtcggtctgcccgttgtattatcgaacttgatccaatactctatagtccactgagtaacaggtatttcgtttttaaagttcagactggttttatttgctgatttcaaaaccaccgctttctgtttattaggggaagtaagcagataaagaatatggtttgcgttaccaacaagtcctatcggtccggctacggaagtgatccgtaccggaatcgcataagcctcgttattgggggtggtaaacggctttatagtaagattaatgactggtgcagacacttcacctgcgggaatcgtaactgtgcgttcaaaacttctgaattcttccggcaaaagttcgtaagacgcttcatgctgttgattatactcatcaatgagttgctgatcaatatccagtgttacagttacatcttgatcaatagcacgaaccaaacggacggtcaatgtttttatcacatctccctcgtccaccaattgtgcctctatctgctgactaaacgtattagaaggagccgcttccgcaatatatactccattatcgatagttgacagttttgcatcgttgcatccggtgacaacagccaaagctgcccccagcacaacatatcttgaaaatttaatcatcttcataattatccttttttagttatgttcttgcaattaatgattagcgggattcagaacctgaataacctcacgcataaagaaatagtcattcaccggacgacaaagattaaaacggtaggcacccactccgccaatgcgggcatctactcccggacgatagtacatcgccattcccttcaatgaataagtcacaataccatcacgagttgtaaattccggtccgccatcccctttatgcttttcaaagtcctcacaccaaactgttttactaagaatcgtagcttcatcctctatcgaaccgaatttatttaataatctgtcaaaacgaccatccaaagcatcactatatccctcatccgacctacagtaataggcttgaaccacataataatctaataaagggcccgactccttgttcagtgtctgcggttctccgtcgaccatcaatatacgtccagttcccgatttcggtccgaattctttcgataattcatccaaaaaaatatgcatacggtccgaatttccactcagatttccggaatagccaaaattcggttcaaagtcgatatcgaatccatcatagttatacttattgattgaatcaataatcacccgcgcatatttacggatagctttttcttgtccttcttccgaagtgtcaccataattgccataccacccccaataagcagccatcgcttcatccttagagttgtactgtacgccatccacgatgaaatcattctcaacagaagcaggcgtatgacttctgcctatatctgtgatatgctgacaatacaaaactctgagacctttcttctctctcacttccttaaggtcacttttttgtgcttcagtcaggttgaaagcccctccccaaagagagacgatatccattgaatcgggaatacctctcaactggttgttcatattcgttccggttccggtccattcactgtaccagccgaaaacaatcggatgatcggatttcttatactctctcagtgccttataatagtcttcaccattgatattcaccggttcggtgaacttcggttccatttcagtccagtcgctgcactgtataaacatcagtgcacccattactccaaatatgatatataataatttcttcatattgttattcctaatttaagctattaataagtaccattttctttcattgcccaccaaagatcagttccattagaatcttttccattgctaagcatactgacggccgcttccacattcgccttattgttattgtattcacttcgtgtaaaacgaagacggcgttgtccgcgccccgtattacaatcggcattcatagattcagttgccgggaagattctaggatagcctgtccgacggaaatctgcccatccgttcatcgggtcgggataacaggcaatccatttctgggtaagtactctttccagtttcttcgcgtcatcagctccatcctcccacttgatcgtaatggacgactggttcgtataattgtttccggtatgtccggcaattaaattatccacataatttcccggtatagatgtagcgtcagccaaataatcatcggcacccgataccccaaattcctcaaaagacaatcgaactcccttttcatagaaagtcttggcatctccacccatattccagcctttcagtgctccttccgcacgcaggaaagcagcttcggcagcgtacattaccggttgtggcaatgttttgtcggtagcgataaagagtttgctatagttggcgtataccgtaggttcaggtatttctgccgaacccgaacggacacctacatacccaccggcagcagtctgagtctgcggagtaaaataagcaggacggcgaggatcgttatatccgttcatgtacgacacgaggcaggcattggctcttacttcgggccatccgctgacaatagcatatccattttcattgattccgccattagtcgtatcataagaactgtcgcccacactttccatcacacctccaagtacagcttcctgagccttggtctgagcatattccggttctactcccgagatgcggatagccatccgaagtttcagcgtattggcaaacttcagccacttcgagcagtcacctttatagaactggtctaccacagccaaatcttgatttacgccgaacgttgccgccgacttcagaatggtgatcgcattatccagatcgtcaaacatggcatgccatacagtctgctcattatcataaggggcttccgtttcgccggccttcatctgtgtgtaaggaatgggaccttgcaaagatgcgagcaactgcataccataaacacgggttaactgagccatggcataaatgacacctttcttttccgtagagttctcgaccagaaagaaagaaggatagatatagccgtagagtcttccccatgaactgtcattgtgcccttcggacgcattataataagcaaagatattctttccaaagctccagttagctgtcgcagtcacttgaccgctaaagctggcccacatacaattaatctcctgacaagcattctgttgcggacaagcatacacgttaaacatcgtagacagtaagttacttgccggtacttttgaaggctgataagggttggtattaaaatcttcaaagttagtagtacaccccgccatcatacatacgactgcgcttgctccgatatattttattatcttgttcatacctatttattatttaaaactgaaatttaacattgaatccgaaatttcttgtactcggaagcatataggcatcaaatccctgatagaagttagatgcagctgaagtggtcagttccggatcgaaaggagccttgcaataaatcatccataaattctttcctaccagcccaacagtcattccgaccttattgtcaaaccattttttaggcaatgtatagctaagtgaaagttcgccgagtcgtacattggtagcgctatacgtgtagtaagccgcagttccctgaatggtctgatagtaagtctgtgcagagactttgctctgattaatctgcacgcctcctgcgtcacgtacgtccgcgctgactttggaaacaccggcagcgtcaagtacggactgcgtctcactgataacaatacctccgaaacgtccggtgaaagtcatgccaagattaactcccttataaccgaatcctaaactccagcccatattcatcttaggcagaatagaacctaagtaggtttctttgttctccatagccagtccgacaccttcttcattaagaatgtagccattcaagtcacgtttgagcaagcgttgtccgtatacgtctcccattgatcctccgacacgcaaaatcaggcgggcatccgtatgtccataagtaagcggagacagttccggcatctggataggttgtccggtggcatagttatacacaccgtcagccaaccgttttacccggttcttattccatgtcaatgtatagttcgtattgaaagagaaatctttccactgcttgttataacccaatgacatttccagaccttcgttcatgatgtttccactttggataggaatattagaatatcccgaagaaagcgacaagtccgcatagaatgtctgattataagtattggaacgataataagtcaagttaagactgatgtcattgaggatacgtgcgtccaaacctacttcccatgacttggtacgttccggtttcagtttcgtgttcggataagaagaggtactggtccagctctgtgtctgttcatcgtaagggtaagtaacggtagtcatgaagcggccgtaagagttacctacctcagtgtacgaaccgcgaactttcaggtatgtcagccaatcaggagcattaaacatactcgtcagaatggcggaaagtcctattgacgggtagaagaaagacttgtaatcggagaaagccagtcttgaatcccagtcgttacgtccggtagcagtcagatagatcatcgatttccaaccaatttccgcattggcaaagatagcgcgtgtctgatcatgccagccggactgttttgctttccatgctttattgaaatcgatattgtggacggcaaagaaattgataagtttcaatccgccttcatatccgatcatttcataacggctgtcactcagtgacacaccaaggttgacattgaccgaccagtcgttaaaactcttattcagtgtagcaatcgcatccgcatacgtgttctttgattgtgtagaggtgtcactgtacgttccacggtcacccgacaccagtgtgccggtagaagcgtatgccttataagtactacgattatcataattatctattttcacacgtcctactacatccagccagtcgaacaactgatatttgagggaagcgttgatcatataacgggtcttcttattctcccgcaactgacgattctgtatccagtagggattggcaagaccgcttgaagtaccgccataaggccagtattgctccatcaggtccataccggaattataacgttcgaacatacgtacatcatcgaaattctcactacgagggaaacggtaaagtcccggcagaggattatagtaataaccctgcgacatcatattcttgtcattctgaagaatataactggcaccggcatcgagtgtcatcttgtctttcaggaaactggtcgtattacggactgtgaagttatagcggttgtatccactgttgggcaatatattggtggtgttggtagtagaagccgacaaatacgcctgattcttcttgttaccggttgacaaagcaaatgagttaatgacattcgctccggtctgaaaaaagtcacgcggatcgtagtcactgtttacaatcggtccccagctatccaggctgttgggcaggttaccatatttgctctgcatctcaggcatcattgacaccttcgagaaagtagtattattggagaccgtgacagaagtcttgtccgcagaccccttcttggtggttatcagcacaacaccggcagcggcagcattaccatacagagctgcggcagaaggtccggtcagcatagagatagattcgatgtcttccgggttaatgtcggcagcgccatccgtaccctgctggtcataaatacctccgccacctccgttcatcatgttatacatcggtacaccgtcgatcacataaagcgccagattggaagaagtgatagatttgacaccacgcatcacgacacgcgaagcacctcccgtggtattggacgaattaatattaacaccggccaccttaccattcagagaagagatgaagttcgcatctttcacagtagtcagttcatcaccgctcagctgctgcacgttgtatgacaatgccttctccgagcgtttgatacccaatgccgtcactaccacctcattcagttcctgcgtcgcatcctctagcaccacattggcaacatttccttttacgggtacttcttttgactgataacctacataggaaaatacaagaacaggattcgccgatgaagtggaaagcttatagtttccatccatatcggtgatggttccctcaccggaactcttctcccggatagagacaccaatcaacggctctccattcttatcttttaccgtgccggcaataagtctttcttttctctgctgtgcaacgtctttttcttttgcagccagtactattttattatccaagactttatattcgatgcccacacctttaaagacttgctccagaacctggaatatattcttattagacactgacaccgacaccttgcgtttcaaatcgagattcttactgtttacaaaaaagccgaatccggactcaagttcgattttgtgaagcacttcctctatggtacaatcgtttgccttcaatgtgatggaagtcttttgcgcatatccatcggacgcatatgccagtccgaatgagcagacaatgagtataaatagtaacttcatagatagtgatattttccttgaagaccgcctaagaaggtttaatcctccaagaaattggacgatacaataattttgcataaatttgtaacgagtttaattaaaaaactagtagttatacttgtcgggaaacaagtagattcacgattactgggctcaatacgggaagatacgaccaatatcatcccgtatcttttttagtttcaagggtctttgtttttcatggcaataagcttttttgaaataaggttattaataacactaaataaaaatttctatcttcatcttctctttacttccttgtacactgttcagataacgccagcgtattttcgaagaagcttctatataattcagtatctgctccaggctcctgctcgtgaatgtcccggagaacaggtcatcatcgggcacattgcgtcgaacgataaattccacatcatatctgtctgccaaaatctccagagcatcctgcaaagatgtctgcttaaagacgataataccatccttccatgccagttctccttcaccggaagtagtatagagctccgtttttccactctgcgaataatagatcagcttctgaccgggtgccatagtaatgtactgaggcttctgagcggtattattaaattcgaaatgaactttcccttctattagagtggtagtaatctcttcggaatgcttatatgcctttacattaaactttgtgcccaacactttaatcgcagactgatgggctgtggaaacaatgaactgtttctccgggtctttctgaacttcgaaataggcctccccgtccagttccactttacgggtacgggaagcgaactgactgggaaaagtcagcgtactttttccgtttacccataccattgttccgtcagcaagcgtcacttgtgtacgttgtccggcaggcacatatacggtctgcatttctacattttccttttgcagggcttgtatcagcacataacttaatccgaaagccaaaacaaatatagccgcaatccgcatcgccttcatcgtaaaagtgcgtagtgaaagcagcttgtcacgccccgttttcaactcatccgcatcctgccaaacaagtgcatcataacttttacggagtgacataaattctttgagattagcggcatcggcatcaatccatgctgcaacttcttctttctctctttgagaggcttttccggatatatattttaaaagtaaattctgattcatatataagttgagttactttataagtaataaacaggagtatatttgctccccctttcatatagaataccactcactaaaagtaatccctagtgagaaatacaacttttttttgctgttattaaaaaaagaggagaaaaagatattttcaagatcatcaaatgaaaaatatcaggaaaggagcatattctttcagattatcacgcagcagcttcacagctttgcttatatgatactctactcctttgacactgatacccaattcttcagctatttctttatgagattttccatccagacgatcggatataaatgcaatgcgcgtcttttccggcataccagccaacaatgttttcacctttgagcgtaattcttcggacataacttccttcggatcacaggcttccaaggttgaaatacggatttccaattcccgttgtcccttatctgtcaggttttggtagacgttctcctgaacctgcaaatgtttcaggtaattgagtgacttgctacgtatataagtgattaatacagcttcgatactcggaatttcctgttttttacttaattcccacaaataaatgattgcttccgatacaatatcttcagctaccaaatcattatggacgtatgataaggtaaacaggaatgctctcctataataggtagtatatatcgaattaaaattaattgcagtcatttcgatctataccttaattccgcaacactattataaattaaactttttaagtacctgagcaacaaaaagttgctcaggattttgccatgtcagaattttcacttatcttagtgttgcaaaaaaaacaagagaatccgacgatagacatggcgaagatacaaattaaatctgagagactcactccttttgggggattattttcaatcatggagcaatttgactccacattatcatctgtaatcgactcaaccctcggtctaaggtgtagatcgttcggttatcagtacagcgaaatcatccgttctctcatgagtatctacttctgtagcggttcatgtattgaggatgtcactactcatttgatgaaccacctctcgcttcatccgacacttcgcacttgtagctctgatactatcctcagggcgataaaggagttgacgcaagaaaacatttcatacacatcagatatgggcaagacctacgatttcaatacggctgacactctcaatactttattgctcaattgtatatttgcatctggccaactgaaagagggtgagatgtatgatgttgatttcgaccatcagttcatagagacagagaagtatgatgcaaagcctacatacaagaagttccttggttatcgccctggcgtggcggttattggcgatttgatagtcggtatagagaatagcgatggtaacacaaatgttcgtttccatcagaaggacacgctgaagaggttctttgcgagatttgaacagaatgggctcactatcaatcgcttcagagctgattgtggatcatgttccgaggaaatcgtggaggaaatagaaaaacactgcaagtccttctatatccgtgctaaccgctgcagttcgatctacaatgacacctttgctctcaaaggctggaaaactgaggaaatcaatggcattgagtttgaattgaactctatccttgttgagaagtggaaaggtaaggcatatcgacttgtgattcaaagacagaaacggatggatggtgtgcaggatttttgggaaggagaatacacataccgttgtatcctgactaacgactatgattcttccgtaagagaaattgtcgagttctataaccttcgtggaggaaaggaacgtatcttcgatgatatgaacaatggtttcgggtgggacagattgcccaaatccttcatggcagagaacacagtgttccttcttcttacagcacttatccgtaacttttacaaggccattattcaaagacttgacgtaaagaagttcgggctcaatgcaacaagtcgcataaaagcgtttgtcttcaggtttatctctgtaccagccaagtggatcaggacatcaaggcggtatgtgctgaacatctatacctgtaataatgcttacgcagatgttttccagactgattttggataatgcctacaacttatgggaatgatattgtgtattgcctcaagtcacattgtggggtaaggggatattgtaggcagaagtgggtgcttcaagttcaaattatctgcaaattcagtaatgagaggacgtgtaaacgcaataaggacgttcaagggcttagttgcggatttgaggctatattaatggcgcttatgcgtatagtttaagtatatccaaaggtctttaatgattgcaaagaaatatattttaattgaataaaagaactttttgaagagaaaatgggacataagccggtaaatcatcagaaggctgacgactagcatatagctttcactcctttctctccacttttttccaatgctaaaaactgaccaatttatgctaaaatcagatcattgcatcatttctatactattatgactcaaaattgctctaatctataaatccaacttcctatatttgcagccataacaattaaaacacaaaaagaatatgattacaagtagaaaggtttctcaggtcaatgtttttgctggtagtccctgggaagtagccagcgtaaagagtttattgaaagcagcgtatatcgaggcatcaatgaaagacaatggattgaacagtatactcatttctgttccatgcgaatattatacagcagcaatgcgtgtgattaataaaagaaaagtttcataggttttaggttaaacatataagattaaagccgggtacgatgggagatcgcactcggcttttcagtctttgtatgattcttttaaaacgaagtaacctttagattggttgactttctgtttgtttaatcttcagtttgctcaatttctactttttcattctttagcttttcaagagcggcaatctgcatattacagaaaaggtgtatgtgatgaatcaagttagtattctgtgacaagtaaacgacagagtccataagttgggcagacagttggtaggctttccgattatttgtattttcgtccggacgacgcatataaagggcaaaacttcggtataagataggaataaagcgttcccacggaagttctaagctaagcaacaaatggttcatattctccagcatacgttgaagagactcaaggtccagcttatcagattgcttgccatacacctctgcccatagacgggcttcttcttcaaaaaaaatttcattgggactttctttcgcgttagtcaaagcgttttcagtatccataagataaaagtttaataaaggggcaaaaaagaacggtttcgcctttcccgttgactaacacatcttaggacgctggaggtacattacatactccccacgggggtacgaaaccgcctatgaggaaagctacaagcaaaaaatgcctgcaacttatcaaaagcaggattccctgcgtcccattataaaatgttagtcactgcaaagatactatttttcaaatataagtatggaatatctgtagatttattaatcagaatttccacaatagcctccatagtaatttgacagcagttttgctctcatgccctaacaaactgtctgtatccctttattcatcgtagttttcggtgtggtagcaactgtggtggcaggtatgagagcaaacggttgctctcactctgtttcgtcctgactagtatcgtttctacattgctatcttttgatttacaggatgttaatatctgacatctcagctattaatgactgataccccatacattattagccaataaatgattcaatgcttctcctaaaagaactggtcaattgaaataactaacatggtcgagtcaatccaaacatacggtcaaagtgaatccaatcgacagatgtttcagaaagtttcaaacgcttgaactaatgattccaagctgttggaactaaagtttcaagcctttggaactatggtttcaagcctttggaactatggtttctcttcgctgaaactatagtttcaagacgaggaaactaatttagttgtcttatcctaaattgacattggaactacaggaataaaatgaagatactacaaaggttagagattggatttagaaaagtgagggcaagcatttgctctcatacctgctaccacagttgctaccacaccgaaaaccacgatgaataaagggatacagacagtttgttagagcatgagagcaaaagtgatgctaaattactattgagcaatccttgataattctctgcacaacaaaagtgcagaaatatgcataatactgcacttttgttgtgcaattatcgcatcattgcagataaatgcacttcagctatggattgcttatacgaaaacttcaacaagttatttaaagagtacgagcacgaatatagcacccattcgatctatcccactttggtattttggaatgaattattagtaaactaagcaaaagcctttttcatcttttagtccacactatttttataaaaggcactaattttattgaattacctcactaacagagcgctagatttcaaaaagaaacttaactttgcacccgagttttatataaagagactgaattagtaactaaaaagattaaaccgcatgaaaattaagactttaatagcctgtttcatactagcttgtgctgcaacttcctgcatacaggatgaagcactgaactcagaagcagccattgatgcttgtacaggtgatgatgtacaattagcaaacatcaatgctgattcaaagctgatcaatgtatatgtaaacaagggagctgacttgtccaaacaaaagttagaatttgtaattccggaaggagccactataaaaataaatgatcaagttgctggagatacagaagccacatatgactttagtgaagagacacattcccggaaattcactgtcacatcagaagacggtcaatggaaacctgtttataccgtcaaggtcgttttagcagaattacctacttctttcaactttgaaaagttattaccttccaatgactacgatatcttttatgaattccagccgggcacttcacaagaaatatctaaagtattacaatggtcaagtggtaatccgggttttaaattgacaggtatggcaaactccaaaacagattacccaactgtacaggtagccaatggtttcagaggtaaaggagttaaattggaaactcgtgataccggtagttttggagcaatggtaaagatgtatattgctgccggtaacttatttatcggaacatttgaggtaggaaatgcattaacagatcctagaaaagccactaatttcggtttccagttctataaacgccctaaaacgctcaaaggacattataaatttaaagcaggagatgtatattccgtagaaggaaaaccacaagagggtgtaagagacaaatgtgatatttatgctgttatgtatgaagctgagaacaattctgtcatgcttaatggtgatgatgtatttacttcagataagttagtatcattagcgcgaattaaaccggaagatgttgttgaatcagatcaatggactgattttgaaattcctttcgaaccggtaaaaggacgagtaattgatgataccaaattaaagaatggaaaatacaaattaggtatagtgctttcgtccagtgtagacggtgcttattttaagggagcagtaggcagtacactgtatgtcgatgaagtagaacttatttgcgaagactaaaaaaacaagaaaatgaaaagatataaattactcaatattatagctgtactactattagtaagtacactttcagcgcaggcgcaagaagaaagaaatcaaggtatcatctggtcgtacttacacggatgggaatatggaatcaaggcaggtttcagtattggaggaacttctccattgcctctacctgaagaaattcgtaaaatagatagctatgcccctggtggcctcgccatttcaattgaaggaaacgcaactaaatggtttgacacgaaatggggaatgactgtaggggtacgacttgaaaacaagaatatgaccacagaagctacagtaaagaactatggaatgaagattatcaacaccaacggcggagagttacaaggcttatggaccggtggcgtaaagactaaagtcaaaaactcttatctgactatcccagtagttgccaactataaagtaagcaaacgttggaaagtctcagcaggtccgtatgtatcttatcttattgaaagaaatttctccggacatgtatatgaaggtcacttgcgtactccggatcagacaggttcgcgagtagattttactggtgaaagcattgctacttatgatttctctgacaatctgcgtaaattccaatggggattgcaattaggcggtgagtggagagcattcaaacatttaaatgtgtatgctgatttaacatggggattgaacgatatctttaagaaggattttgataccatctcattcgctatgtatcctatttatttgaatataggattcggatatgcgttctagagaaaacactacaatttatttaaataaaaacaactaaaaaagccgttaattttaattgcattaatgtatacaattggaattaacggctttttctgttatatatttcttatactcaacacactattgaggtgttaccgtaaaactatcaataaataaggtactaccaggagcgcccataaagtagtctccttcagcacttgaggaacacacaatagctaaataatattttttagttgcatcataacttttcccttccaataatttaaatgggatagagaacttagtccaatcactcttcgctgttccatcttccaaaacggccttcattacaatacgtttagagcttccaatatatagatcaggatcattgtagtctccattcaacggaatgttgttattctcttcatccaaaagttcttcatacaaaactgcatatattgaacattcatctgttttatcagctacgacttcatttttattattataatatgttgtccctggagtatatttataatagccagtaaaagtagcaggttccccaacaaaaggaacaccaaactttgtactattcaaagtattattcatatcagttttaaagatacctgtaaataatgagcctgctgttacataaggtaccaaccctcctaataatgcattaaaatccataccatttaaaaacatgtaagtataaactgtttgcaatttagctgctttaccactttgtccttctacaggagaaactgtatatgagaacagctctggaagatttgaaccaaacatctcgttaattgtcataattcccggattactagtaccataaagtcctttaggaacatcatattgttctgtagaacccgatgtagatgatttgatagtctcccattcatcgaatccaaaatctcttatttgacctgatacagaaactgtatatttagtagttacaattccatcttcggaagtcactgtgtatattacaggagatgaaaaatcttgttctactccagaagcaggagttattgttgctttatcagaaataacaatagtaggcgcaaacgtcaagttctccaatccatctggaataataaaactaatattattcccatctattttcccctctacattcgcatctcctatcttaactacaaagctctggatcgcagcctctgaactttgatctgcagacagttttgttcctgcaaaatcaaccttcacattcaaagttccgccagcaacaacagctatattcattgccagtttatcaccttcaatagttccattcactgttacagcacattcaccaactaataatgtaatattctgactacctgcaaaagtataactattaccatttttttgtacagaaatctgttctactgcaatagtaccaagattcaatgtctgaaaactaaagtttctcagctccatcttaatttggttttcaccagtcttagaaatatatactttttgtgttatatcattaacttcaataactccagctgcatcaacatctaacttaccccaataaactccatcaatttcaccatcccgaatagtttctgggtcgtcatcactacaagccgtaaaaaggctgactgaacaaataagcataaacaaatacaacaaactctttttcataattctgttatttaattaataatctatttgatcgcaaaatcgggtacaaagtaacatatttatattagttatcacaaggtctattctttgtattttatgatctgattttaagattacattacccaaaacactgttattatagagtttttaaggttcatatttacactacatctaacaaaagagcattaaataaggggagattaaaatcccccctttttattcaaaaatactatagttttcaaagttatatttctaactaattgattcaatctaacctcctcatcattctccaataacctctaactcatcgataattaaagtactatttacagctcctttaaaagctgcaccatctttacttgaggaacatacaattgccagtttatatgatttagacatatcataagattttccgtccaaattattgaatggcaactcaaaagtagtccactcagcttttgctccaccatcttccaatacagctacagctacacgatactccgaagatgcaatatcatgcccagtaagtattacctctttgccttcactatccacagcttcatacaaaacagccattatagagcactcatccacaatttccagatgctccagaacattctttttatcagaaccatctacatagttatcaccaggagtatatttataaatacctttaaatatcaaaggcttttttgcatatggaataccaaatttagtagaatttaactgatctgatgcatcggtcttaaaactaccagtaaataaagagcccgaagttatcgcaggagccaatccaaaaccagctccttttgtatataaagttatcaacttggcagaggagccactataaccatctttatcttctaccacaggaaaaccacctttaaaacctaaagtagctaaaagccctgctccttcattggaagtgctcaattgatccactggagccggattccaatattcatttttcaaaccttcatgttgaacaacccaagtatcaaatgaatactttaaaaaattctgactacccgctattgaagctacatattttttagtcgttccatcttctgctataactgtataggtaacagttttaccagcggaaaaatcctgtgggacaccacttttgggagccactgtagctttttctgatatttcaataatcggagtcaatgatttcaaatcatcatcagtagcttcgtcattcactttaaacaagattgtacccttttcttcatcaataaccggcgctactgtcacaacctcattatcaatagtaaaactagtaattttagcctctgatttttcacttcccgatagtttagcacctttataattgactttaactttcattccgccttctacatctacatcaataaccatatctacagcatccttaccaattgtccccgaaacggatgtattgcacacacccaccacaagacttaacttctgattgcctgagaacttatatgtatcaccactttttgtcagagcacaattatccactgttatatcaccaataagaagttcagtacccgccacggtaatagtaaagtttctcaattctaatttaacggcagtatctgaagcctttgaaatataaaccttctgaaccatatcagaagcaataggagtagatactcccacataatatacatccatcgttcccttatatgcacctgcaagttcactatcaacaggatatttcacatcatcatcatcactacaactcacaaataaacttatggaacaaataagcatgaacaaatacaacaatcttttcttcataatcttcatagttaaatattaaatatttcttatcacataaaattatgcaaagttaattattaaaaagcactaccgcaagtgctatttttggtattatatgttccatttttaatatattctcaatatttactctaaaaacaagtatttataggtcgtgattctatatcctataaatcccacatccatcaacgacagtcaaataaaactttccccaatttaatatccgctcaacagcctcccccttacgaatgacagaagtgaatttacaacattataattattgcatatttattaaaaaagccgtatctttgcagtcttagtcataattgaaagtttgtcaaagtacaaagttagacatgtttaatattgaatttattacaaatgtcgtttcgttgtgatggcggaaccatttgaaattactactgatttaatatcattttactcagaatattcactcgtgacgatgcgatattctttcttaatctataaatatatatatttgcaaatgttgacagcccataatgggcagttagcgccgtttgtatgcgtgatgtcttacgtgtttaaatttagtattgcttatatacatgtttataatgatgaaaaaagccctggaccgtgatggttcggggcttttcttgtacttgcaataagcaagaaggaaaaagatttcagattacatcggtaactgtgctattatctctttcgaacataccggcaatttgccattctttcccatatccacaaaaaccgttgcacacaacaccgtccattggtcaccatatgtcatcgtactgctatggctatacccaaggcaatgcccgtattcatgaaacatggcctgacggggataattatgcggatgggcatccggaggagtcgcatcaaaataaacaccggtataacaataattagccaagccgtacgtattgcctccacctaatccgccgacaccggcaacacaacccagcacaagcccgccatgattacggattcttagacgcaacgcatccagattgatcggatttcctccattgtctttcaacaaaccttcgtatttgttcatttccatattaaactcttcggaagagaacatgaaagccatattgacagccaacgccactccgtgacggcacaataacggattcatatgacgccaatacgcatgaccattgtcagccgaataagaagaaaaacgtataaaccagcgactgtctatctgttctattttcttcataaacggatcttctgtacgaataacaagcgtcacatcatcattggaaagtccgggctgtgcaggcaccactatcttccgtccactacttgtagtgaatgtccgttccgaatctacaaccggcaaggggaatgacgcttccataaacggataaatctgctcgaaatgtgccagttcgaagaactccatgctaaatttattaaagcggcacataatcttcacatcctgaatacctacaggagaaaagaacttgacaagcaactgatgttcgtctgaaatggaaacctgcaacggagcattcgcataaaaagaacgacggcgactgtcataaaagacctcacgtggctcactggccaaaaacatcgtatccgcgcgaaaccgaaagaagtcctccttgcgaacataaagtgaaccatcctgattttccggatgcagataatcaatactaatatgagatacacggcctgcctcaatcttacaatccgtgaaacggtatttacggacaaactgagttccgtcactgcgatcggactcaatcgtcacaaatccggataatgcttttgtgccgggcaatgagtaaaacgagtatttcccggtaatgtcataagattctatctttctggttccggaatatttcccgtcggcaccaagagtcgcatatattccttcggcatcgtcgaaagttatatcgattttacgaatgaatctccacatataatcggacgatacattcaaatcgacatccactctccctacagaacgctccaagaccactgtatgcgacaccgaagcctgatctctgccgatatgcaattctattttcttataaaagtaaaccgcatctaacggcgcattttccgcatgatttatcaaccagtcatcggacagtttttcgggttctttaacagcctcatcttcttcctcgctcgtagtagccaaaaaaacgactgtataatcccccatactcaatccttcgatagtcaattttgagaagttttcttccagcttctgatataagggcttaataatctctccacgttcattggcaatagcataccacatacgagtgatctgctccggtttgcttccgcgtgtctgcaccacggacgcatcgtcttgctgcaacccaaacaaaaacgacacttgtccggaatgggaagaaacaatgccggtttcctgttcaaaatcgcccgaacagttggtaagcaataatgcgcccagtaatatcattatgattcttagcatcttcataaacagcctcctctatttctttacacaacgtacggatgcaaatgcttccatctgtaaccgctgtttcttaataacggttgactcggctccttcgaacggcaaccagtaagcccatgcataaccgcccggaagaccgttacgttcgtttgtccacaacacagctcttttcccgaaagccggattattggatgacgacttatctcccttcgagccagccaaaggaataataaggctgcgaccggtgtcttccgaagtaaacttcacataatgctgtgttcccgtcacaccactggacggagttatcagtgttccttctccgatgtgaagtgtagcggcaattgtttctccatttcctgccttatatctacccggaatctcttggtctgcaggaagcagagactgccattcgttaccagtcggtatccggtatccttcagggcaaggcatatgtgtatcattcacccaaggtgcatcagctgtctggttacctaaattgttggaaggattatacccctgccaaggcacgtacatatataaacgtccaaattggaacagaccacccaccgtgttaatccaacttttatgatacatatcttcgaccgtagccccgtccaacggataaatctgatcttccagatcgcggctacgcgcattaaatgccatccatacatttcctgcgatttccacagtttcaatctgtttgtcactcggagccacacgtatctccacgtaatcatatgttccactcaacaaggcatttttcaaatgcaccaaaaccgtatagcccaggcgaccgctgccttgcgctgcaaccgatacattaaatgacgacacgataccttccgcctcttccgacacggacatattgcctacacttgttccgctaccggcaccttctgtagaagaaatatcgatacgagtgtctgtaacgaacgccagtgtcatgtcatcagcacctgtagcaggcacttccagtatattattctcatagtctaccttcaccccttccggaatcctggatttcgacgcattaagcaaaagacgttggttcgtatcaggctttccgacaatagtttccccttcttcccacggtttgatctcaaaaacgcctgtcacttcagctcccacattgagcactgccaattcatatactttattgcgttcgacaactggtaattcgacttttaacctgatagggacttcaccataggttccacgcaagatgatattgacaggacgtgtgctctcgaacagacggaatcccccctcttgcttgccatcgaatgcagaagagaactccttccgatagctcaccgttttatccgacgcccggacattttcgaggaatggtaaagtctcggcaggagcattctctacgatgacttcctttatctgcgttttgctgtcggctgttgtgttcaaatcaatgcgcgccacaccgcgtttcataattacattgacctccgcattgctgtgtgtcactactccgctctccaattcgactacagccgccatgaaatccggcgcagaattatcatgcaatccttcaccgataatcgtattacgaaattcttcttcacttttagctttctctccggcaggaatctccagtccggtcagaaaataaagtcgagatccgctgaccgcagaaatctccgactgtccgccttgcccgggagtcagctgttcctctttatataaattcccgtcactaaactggaaaaccgatacatctttgagctcttcagaagattcttctcctgctaccgtaattccttttaataccactgaataagtttgttgatggccttttcccccggttggttcatcgttcgagcaggcgcctgaaagtaatgttcctattataataggaacgatggtttttctgcaagaataattcatgtttttttgattaaaataatactgaatattggaaactttataaatgcattttccaaaagcggcggcaaaaatactacttttttcaatacagcaagtcatctgcataaaattttaataaatatgttgaataaaagaaatctttaacgtcagactaactaaatacaaaataaaaagttatttttgcaaacgttttttaattttatctcattctaatattatgtacaagatttttcacggcttccacctagtagaagcttatcaggacttaaagaaagctaaacggttagcaaagaatcagacagtggcccgatgtataaagttaaccatagctattaccctctctcttattttatggttccttcccattgatacttttggaatagaagggttgaccgttatagaacaaagacttatttccattttcattttcgccacactcatgtgggtgttcgaagctgttccggcatggaccacttccgttcttattgttgtactattattacttaccgtttccgacagtagtttatggttcttaacccaaaatactcctgcggaggaattaggacagacagtcaaatataagtctatcctgcattgctttgccgatcctatcatcatgctgtttataggtggatttattcttgccatcgcagcaaccaaaagtggactggatgtattgttggcacgagttatgctgagacctttcggaacacaatcacgatatgtgctattgggattcatcctcgttacagctgtcttttccatgtttcttagcaatacggctacggcggccatgatgcttaccttccttactcccgtattaaaagcactcccggcagatggaaaagggaaaatcggattggctatggccattcccgttgctgccaatgtaggtggtatgggaactcctatcggtacaccacctaacgccattgctttaaagtatttgaatgatccggaaggattaaatctgaatatcggttttggagaatggatgagctttatgttgccttacactattattgtactgtttatagcctggtttatcctcttacgactgtttccattcaaacaaaagagcatcgaactgcaaattgaaggtgaagcaaagaaagactggcgctccattgtggtttatatcacctttgctataacggttctattgtggatgttcgacaaatttacaggagtaaactccaatgtagtggcaatgattccggtagctgttttttgtataacaggcgttattaccaaacgtgacctggaagagatcagctggagtgtactctggatggtagccggcggcttcgcattgggcgtagccttgcaagagaccggactggcaaagcatatgatcgaagccatcccattcagcacatggccccctgtactgatgattgtcggttccggactgatttgctatgctatggccaactttatttcacacacagccaccgcagcattactcgtccctattctcgccattgccggaatcagcatgcgtgaaaacctgtcatcgttgggaggtgtagagactttattaattggagtcgccatcggatcatcgctggcaatgatattaccaattagtacaccacctaatgccctggcacatgccacaggaatgattcagcaaaaagatatggaaaaggtaggtatcattatgggaattataggacttatcttgggatatacaatgctgatcatactcggctccaacaagttattataaataatctatttaaaaaaagaagatgtcaaaagcaggatgatacatttatcttgcttttgacatcttcttctttttcgaatttagcgtcctataatcctctccaaaagtttataagaaacaacaatggtataaaacgatatctcgtctactctattcctgatccgaattcacaaacttacttggactgacattataatacttcttaaatacctccctgaaatacttcgcatccgaaaacccgacaatttcagcaatctccgttattgtatattctttctgctttaataattgtgctgcacgttgcaaacggatcatccggatgtagtcagccggagcataaccggtcagcgctttcagtttattatagaaacttgttcgactcatatgatgctgattactgagtacatctaccccaaagtccaaatctcccatattcttctctatacattccttgactgaagctatgaatttccagtccaaagtattagtacaattgacaggtaaatgcttttctttattttcgatactattatagacctgacggagcaattcacgatttgccaatatgtttttaatagtcacctttagtatacccacactgaatggcttggttatataggcatctgctccgatttccagtcctccgagtatatttttctcatcccctaacgcagtcagcaatatgactggaatgtgagacatttccacactcgttttgatagctgagcacagttcgtctccactcatctcaggcatcattatatcggatataacaagatctggattaaactcctttataatgacaagcgcatctttgccattggaacaggactggatattataccctgccataagcatatccacaagataattacgcaaatcatcattatcttccactaccagaatacgctgtaaagaggtttttatctgaggtgcctccaagaccggcaagtcagaagttccccccagtacaacagcatccatacgttcattcggcgtttttggagagataaactttgctttatgcaaatgggtatttcccttcgggaaagtaatttgcacgcatgttccctgatgttcaacactttgaatatggatctttcctttatgcaacttaaccagtttatataccagcatcaatccaatcccacttccggtcactttcaaattgactacattactaccccggaaacaatttctgaataatttcttctgttcagatgaaggaataccaattcctgtatcctttacctcaatactccaagtattcccttcctcgcaagcacaaatacacacgctaccattctctggcgtgtacttcaacgcatttgacaaaatattcttcaagatagaccccattttgtcactatcaaaccacacattcaaataatcaaaattactctcataaacaaatctgacacgcttcatctcagcatatttgcggaaagtagcacaaacatcattcatataagaattcaattcatactcagaaacataaagagtagacgaatatacgtcgatccgttcaaagtttatcaagttggttgtcagctgaagcaatgtattcacattctttagggccatattcatatggggtaatgccttctctgccaccatatggttttcaacaacttcttccagcggtgcttttatcaatgtcagcggcgtacgtatatcatgagcagtattaataaaaaaacgtgtcttctcatcagaaatcttcttttgtttatgcaacatgataacacggaatatgataatcataatcaagaccaccagaattgcataccccaccattgcccacatactggcccacaccggaggggtaataatgatctgaatactccttgtttcataagttttatacttctcctcattagatacagtacgaatttgtaacgtataactgccaggaggcagatttctaacaacaatccgattatcttgactcggacgggtccactctttatgataaccgtcgattttccatgaataaagaatattagaaggataatcataatttatggaagccacatcaagcgaaaaagtattttgaccgtaggccaattccagacaatcagtctcgttaatatccttcttcaagggagatccgtcatcaccaggatagacaggatgataagctatcataaaatctcgtaataacaaacgcgaataatatggctcaggtatttctatgtctgtcggaaacttaacagcaccatcattgccaccaaagacaagcgtactgttactgtaagttgtggcagaaccggcattaaaatttacgctcatcagtccctgctcccgtgtccagttacggaaaaaatgatctttaggtgaataaatcgtaataccattttccgtacccatcaggagattttcatcctgacgcggaataatcgtataaatattatcagaaatcagtgcacaattatcagttcggtactgatgaataaacttctttttattgatatcataaacaagaagacctgctccacgagtaccaatatacaggataccatcttctctctggtataatgcacatatataaggagattcaacaggcaagtcaatataccggtaaacaccggattgcttgtcaagttgatagagtcccattcttgtaccaatccacatttgacgggcatttttctccagaatggtggtgatggaacttactcccggatacaaacgaacatttttagtctcaagattaatgcgtttcaaatgataatatccaccggaccatacatcaccgctcgaatcctttttaatgtcataaatatattggtcaggacgtattcctgcaatggccgcaggcgaaagatagcttattttaaaccctttcttcttttctatcttataaattccagacgtaaaaccaccagcccatatcacaccaggagagacttcacacaacgccaagaagatatgattctcatcatccggcaccggatcaaaagaactaaaaaaagaacgccattctcttgtatcggtctgataaaaactaattccattactagttgcaaaccaaaggtcaccgtcactatcttctatcacatcatgcacctgatcattcactaacgaccggttattgccaagagaatgctttatcaaatcatatcttccataacgattgttacgaatggtaataccagtaggataattggcaagccaaatacgctcctcctcatccacatagatatcattgatattgtttccgttcattccattataactgctatagtcagccgttatataaggttcactcttacaagtatttacattcagcttatatactccttttccacccgtagctatcaacaactcatcagcgttcagagcaacaatctgattaacttccacattgtttggtgcataacaaggagtgattttttgggttttaccaatatcatatataagtatcccttctttataactacccacaaataattgctttgacacagtatggtaatacagttcgtgaacaggtgtaacgatgctttttactacttcatcaggaatttgtttcagttctcccttttctatcccgacacaaaacaaaccgcttcccgtaccgataaaaaaatgaccgccatcagcctgctcaatagtagatattgcaccatcgacaggctttggcatatgttgtgttgttccagtacgaatattataccaggtaattgtatctttgtaacatagccaaatatgatcattcttgtccagataaccataatcaagaaatgcttgaaacttatttcggatcaattcagggtgtacataagccaattcaaatttatcatgttgtgaatcatacctgaaaatacgtcctttctgcccgattacccataatacatcttcctgatccatataaagccagttcaaagctatccgtgagtccagcttcatactgtcatccgagaaagtataatgcttgatgtgtttaccgtcataacgatctaccccctcctgagtcaaaaaccacatatatccgcgtcggtctttttgaatatggtagattttctggttgttcaaaccgtcttccaaccctatgtacttataaatctgccccttgctcacagcactactaatgagaagaactataaacactaaaagttttctattttttacaattatcttcattcctttcacaaaacactcaaaaatacatttgcaaaaatatgaaaatattatttaaacagcaactgaataaattaataattatatgttaaaaacagaaacttaaaaaacacaactatctcatctatcggaaatactgcataataccccaaatactccccaacaaaaacatcggaaatagataagtgttctttctaaattatattagtcattttttgtacgattttccagcatcagatcataaatatacacgaacaggaatcatcttattattaggacaatttcaatcatatatttattccttcgattatgcatttaaaatccataagcctctcttcaattttccataaaataaaaaatgatgttaattccattttcaaacttcgaactattttttttaatcccgtgtttttttcatacagtaggagcttaagtacatttcggatgatataacaaaagtaatataataaatcggggaagtgtaatagagtaaacctacatatttttctaaaaaaaataagttttaaacattgtttcatcaataaaatctacagccatgaaaagtataagttcaaatttatggatcagattaatagtcagttctatcataggaacaataatttattgtttatcaagtatgagacagcaaacaagctgactataaagatgaatattctagcgatatgaataaatatttttccattcaacaagcaaaatatttttcctttataaaatactaattatatatctatatatttacatataaacccactaataagtatgtgactttaagaacttaacttacatacagtttcttacttattaccaaactctatttttaactatctaaaaccaacttaattatggaaaatagaacttctgatttatggctcggtcttggtataggatcggtcattggcgccctcgtttatcgtttttcacgaacttctaaagccaaaaaactaaagaaaaaagtatgtgatgcctttcataaaataagtgggcaagccgaagaaatgttagatactgcaaaggaaaaagtattggatacgggtgctgccgtagccgataaagttgcagacaaaactttcgacctagctgaaaaggcagatgaccttaaaggcaaaatgcatacaatagctgctgatgcaaaaaaatgaaacagattctagtaaaccaattaagaacactagagtgtttctgaataaacctaaattattaactaaaacttttgaattatgaacaagaaaactgaaaagaaacaggaagaggcaaagggcactaaaaagaccgcccaagctaaagagtgcaagtcttcgacttcaagcaaaaaaactgaaaagaaataggcattcagaatcgttaagtttgtgtcattcttcaggcagacaggaatctgcctgaagaatccaccaatttattctcaaagtgactttacaattttaaattaaaagaatatgaaaaaattattatttgcgatttttgtagttacaactataatatccttcacgtcctgtcgtaataaaaaagaacaggataaagcgaaacaacaagttgaaaaagtgaaagaaaacgtcaatgatgcagtggacaaagtatccgataaaatcgaagatggtgctgatgccgtaaaagatgcgtggaaagacaccaaaaaagacgttcaaaacagcgcagagaaaaccaagaaagaaatcaaggaaggatataacgaagtgaaaaaagatgtaagtaaaaaacttgactgattcttaatcgtatatcattctataaatagtaacttcttacatattaataagctatggttggatttgtaatatggattgttggattagtactgactatcaaagccgcactggaaatatggcgtatccatgcaccaatagaaagacggctgatagctattatcttaatcgttcttaccagctggataggattgctgttctattatttctacggcaaggcacgaatgccgcaatggctgggtactggagttcaaaaatattagctacatcagaaagcaatatttatatgaatataattctaaacatgggagagtacagcaaaagtcaatagcaactctcccaaaatttccctccttcaagaaggagatttgagttactattgacttttactctctgcaaattaccaatatttttcaattctctcataaccgaaaatcctaccgcgttcatcatctataccttgcaacttcttgcagataatctgtgctccaatcatactaaaggttatgccgttgccaccatatcccaaatcaaaaaacatcctgtccttatctggacaattaccgataaagggtaacccatcttttgttgtactaaaagtgccacaccacgccatttctgttttaaaaggaatacttggaaataatctcctaaatttcttttctaatacaagagttttctttctgagtaacgcatcacggcgctccggatcactgaacttttcatcttcaccaccgacaatgatacgatttccccttgtagtccgtatatacaaatatggctcagctgtttcccaaattaaacactgttcaggccacaaatctttagaatctaccggatgcgacacaagtgcataagttgaagtcaaatccataatttcccgagataaaaacttccctgcttcaaatccggctgcgatgatcacatatttacactctattttatgtcctctatctgtttctataatatatccttcaggcatttcaacacattctgttacaccggtatgagtaaaaatttccagtccatcttttttcatatggtagagcaaaagaccagtagccgctttgtaagcatccatctgcgccgatactcggtttaacagtgcattgcctggaacctctatattatacagtttttttatctcctctttttccagcagacgaaccggcaaattgtgcttctttcgtatcacatattctttttcaattaattctatatcctttggaatactagcataaaaaagacttggtcgtttttcaaaatcagcatctactcctgtttcctttaataccttttcaatatcagcaattgatgccaaagatgcgcgatatgcagaaacagcattatcctctccaataatttctgccatttcacaaagaggaacatcaatttcatattgcagtaaagcggtacttgcaatggaacttccagttgcaatgcttcgtttgtcaaccatgcaacatcttaaaccggcactacaaagctcgtgtaccatcaaagcacccgttataccagaccccacaactacaatatctgttgaaaaatcatcctccaagggatgaaagtaatctaacaatgaatttttaacaacccaatagggcaatcctgaatgtaagtccataatatattgaattatgcaaactccctttcatcctcctccacacttacagcggggagaaaaacgtaaaaacatggaaaacacaaaagcattcccaaaagagtttactcccgatttataataagatactattcaccctgttcaattgcgcaatatcttttacattgtatcaaaacgttctcaaaataaacaacatcacacaaaaaaagatagttcgaaggaaaagactggatttaacatctatttaatgcataagaaatattgtaaaacaaccagcatatatgaaggtattcaccaaacaaaatatcaacatactatctaaataatatatcaaggtatgaaattaaatctcagtagatctatcacatacttttttaacattaaaaataaattcaatgacaataattatcaaatatattcggtgaggttgtaattgcccctttatcagcagggcatatggcggtagaaacacacaaaaagctccgtaaatcaatgatttacagagcttttaatcaggaatactcgtactcgaagcgggacttgaacccgcacagccgcaatggccaaaggattttaagtccttcgtgtctaccattccaccattcgagcatcctttcaaagagagcggaaaacgagactcgaactcgcgaccctaaccttggcaaggttatgctctaccaactgagctatttccgcattttttcaacgggtgcaaagataatgagtttccttgtttctgccaaactttcgatcaaaaaagtttggcagaaaatatttatcgccctaataatgctttctcagcctgctccattccacagaaattgaagccatcgaccacttgttgcattaatgcggagatttcatcattacaaagattaccgatacttccttcgtgtgtatgatgcacctgtttgtcatgagtaaattttccggcttctatatcaagaccgactttcttatacgcatcacggaaaggcataccttcacgagccagtcgattcacttcctcgacactgaaaataaacagatatttatcatcatcaaggatatgttcattcaccttaatctcattcatgatataagtcgtcatctgcaagcagtccttcagttcctgaaaagcgggaaggaaaacctctttaataatctgtaagtcacggaagtaaccggatggcagattgtttgctatcatcattatctgctgaggaagagactgcagtttattacatttagcacgtgtcagttcgaacacatccggattcttcttatgaggcatgatgctcgaaccggtagtacaatcatccggcagcttcacgaaaccgaagttctgactattgaacatacaagcatcaaaagccagcttggagatcgttccggcaatggtagccaatgcaaaagcaacattacgctccaacttgccacgtcccatctgcgcataaacgacattataattcagcgaatcgaaacctaacaaatcggttgtcatcgtccggttcaacgggaaagaggagccatatcctgctgcagagcccaaaggattgcgattgcacatcctgaaagccgcttgcaggaactgcatatcatccaccaggctttcggcataagcaccgaaccacaatccaaaggatgaaggcatcgcaatctgcaaatgggtatatcccggcatcaggacatttttatatcgctcactctgaagaatcaacacatgaaagagttgttccaccgcttccgcgatctcgcgaatctgtgtacgggtaaagagtttgaggtccagcaaaacctgatcattccgtgaacgaccactgtgaatcttcttaccgacatctcccaaacggcgggtcagcatcaattctacctgcgaatgcacatcctctactccttcttctattataaactcacctctttcgaccgaagcataaatagtcttcaactcagccaacaactgttccagttcttccttggtcaacagaccgatactttcgagcatcgtaatatgagccatagaaccgagtacatcatgtttagccagataaagatccatctcacgatcacgtcccaccgtaaaacgttcgatgtctttatttacctgcacggatttttcccaaagtttctgcgccataatatttaagtattaggtaataagtagtaagtaacaatcgtagttacgttgatactccgcgggtattacctattatttattacttattacctgtttaatagttaatcatcgacagcatctcaaccatcttctccagaccatcctgaagaggtttctgtaccatcgctttcataaacggattgatatccatactgatagtcactttcaacttgcactcttcctctgttgttgagactagctgaatccacatattaaaaggtagcggagagttggtagttgccagtttaatacatttgcaaggttcacgctcaacaatctgcaacgtcagctgaccgataggcgaaacgctaaagctcagtgtatccgaatcaaaactcaagtcctgtattttatcttccggcaaacggtcttttaccgattccagattgctcaagtccgatagcttggcatacacacgttcctgactgtaaggtattacctttacactactttcaaaattagccataattctttattcgtataaaatcaaagaaagaactatccgaacagatattgtccgaatggttctttcttactaaaatttccgatcaaataatacaatattatttccctgcatcccaatgagccgggtctttacgccaatcgttcaatgtcgcaatatcttcttcttcgatataaccggtacgaagtgctacatcaagtactgcttcgtaattggtcaacgtcaccaaaggtactttagcattcttgaatgcttcctcggcaacgggaaagccatacgtataggcagctaccataccgatcacttcacaaccatcgcgacgaattgcttccacagccttcaaactactaccacctgtagaaatcaaatcttcaaccactacgactttcatacccggacgaagttctccttcaatcaggttttccaatccgtggtctttcggggtagaacgaacatacacgaacggcagattcaacgcgtcagccactaatgctccctgagggatagcacctgtagccacacctgcaatcgcatccacctgtccgaatcgttccaatatcagacgtgtaatctcaatcttcacaaaattacgaagagaaggataggacagagttttacggttgtcacagtaaaagggggatttccatccagaagcccatgtaaaagggttagcgggttgaagtttaatagccttaatcttcaaaagtttctccgcaaatagtctctctaagtttttcataactaaactaactattaattatttgccgcaaaagtacagaaattgaacgagaatagaaagaagaatccgtttattttttaactgaattgttcctcttcctccggaatttcgatacaacgacgtatatctttgagttcaaaaccacggctcaccgcaaatcgcatcagctttccgttcagttcataatcatctttcgcatgaatgcttttccgtttggaagccagcaagtcacgcaggatggagagatattcctcttcatcaatttcgttcagatgacgccatgccacatcggaaggaatcttcttcatgtagagtccctgtgctattttcatcttaccccatttggcaaaacgaaacttatcgttcacaaaagcacggcaatagcgctcgtcatcaatatacttttcggtttccagccgttcaaggatacgcgctatggtctcataggctattccccaacgctgtaatttctcatttacttctgcccggcaatgttctgcagcggagcaataagaggcaacacgattcaacgcctcttcatctgttaattgtgcactcatcggttagctgtaagtattctatcttttccaaatatgtcttttataacacgaacgtcccgatattggttcatttctatcatgcgtatcatgtcttgtccgtatgcctgattgatttcaaaatagagtttgccacccggacgaagtagttctcgtcccagttccgcaatccggcgatagaaacgcagagggtcttcatcaggaacaaacagggcaagttccggctcccagtcaagcacattggcttccatctctgttttttcagtttccgtcacatagggcggattgctgacaattatatcgtaagatgccccctgtattccgtcagcagaaaaaacatcctgtcgacggaaggtgacctgagcatccaactcttcattatttttacgggcaatagccaacgcttcttccgaaatatcccaggcatccactttcgcatccggcagatttttatccagagagatggcgatgcatccgcttcccgtacctatatctaataggcgacgggcatccggattctccttcacaatcaggcccaccagttcggccgtctccggacgagggatcagcacgccgggagctacccggaagttccttccacagaactcagcatatccccgtatgtactgtattggctcatttttctgcaaacggaatataatgttttctaattcacgctgtttgcatgcagataaaattatatctttgcccatgtaaatatcaagcgcatccacccccaacatgtcgcaacagatcaacatcgaaagagctttgacctcttccggcggataaatatcctgtagtgactgacggatgtaagtagtgatgcggttcatattttacgatttcggagtgcaaaagtaagaataatatagcgaagagcaccaaaatggaagaagaaaaatacatgagacgttgcattgagctggcaaaaaacggactgtgcaatgttgctccgaacccgatggtaggggctgttatcgtatgtgacggacttattatcggcgaaggatatcacatccgctgcggagaggcgcatgccgaagtaaacgcgattcgttccgtcaaagacaagtctttattgagccgttccaccatttatgtcagcctggaaccttgctcacactacggaaagacgcctccttgtgccgacttgattatcgagaagcagattccccgtattgtaattggctgtcaagacccgttctcacaggtcgccggacgaggaattcagaagttgcgggacgccggaagagaagtgacagtaggcgtactggagaaagaatgcaggtatctgatccggcgcttcattactttcaatacgctgcaccgcccctttatcacactaaaatgggcagaatcggctgatcatttcattgatgtagaacgaacagacggcaatcccgtagtactgtcctcccctcttacttccatgcttgtacataaaaagagagcggaaactgatgcaatcatggtaggcaggcggacagcattgttggacaatccgtcgctgacagtccgcaactggtacggccggaatccggtacgcatcgttttggaccgtgcattgtctcttccccacagcctgcgtctgtttgacggagaagtacccaccatcgtatttacagcagaaaaacatccggacaagaagaacgtcacataccgcacgattgaattcacacaggatattctgccacagatcatgaaagtgctatatcaacaaaaaatacagtccttactggtagagggaggaagtcagctgctccaatcatttattgatgccgaactatgggatgaagtatatattgagaaatgtccgtgcaagctgaattccggtgttaaagcacctgaaataagcgataattttagttattcgactgaaaaacacttcgacagacagatttggcattatgttttcgagaaatagctaaaatagttctattcaaggggttctacgtcgataaaaacagcgttattatctataattttatataaaacttccccttaatgttctatatcggaaaaaatgttcctatttttgcaacttgtaaataaacacaatctttcaaatgagaataaagtttttatcaatcattgcgagttttttcatggtgtcattcgttattacgtcttgccttgacaatgataacgaagtcaattatagtccggatgcgactatacgcgcatttgagcttgacactataggctacggggtaaagtataaattcacaattgaccaaattagtcgtttaatatataatgtggattcgctgcctgtcaatgctgacacgatcattaatagtattctgatcaagacgctgactacggcatccggtatcgtgacgatgaaagatcagaacgatcaggattcaatcgttaatattaatgactctattgacctgactaagtatgtaaatgcaaccgagaaaaacaactttctggtactgaaggtatgggcaccgaatatggaggttcagaatgagtacaaagttaatatacggatgcatacgatggttcccgattcactcagttggggaaaagaccctatagcgaacaatcccgtgagcaacactgctgaaaaacaaaaggtagtaacgcttggggacaagatattattattcgctcaaaacaatgaaatttacagtacagcaataccgacaggctctcctactgatcgtttaaactatggtcaaaaatgggataaagaaactactggaaaacttcctgttggtgctgatattacatccattatccgattcgttgacaagttatatttacttgctgagaataaggaagtatataattccaatgacggtttgacttggacaaaagatgaagtactcaattccgatggtgtttccgttactaatctgataaccagcttttctgacagtgatggcagtaaccataaaaagataaatggaatagcaggtatagtagagattaatggagagaaatatttcagttttgcagagaaagatgcaacatgggagaaagatatagacaaattaacagctgtccctgctgagttcccgacaaacaacctgtcagccgatgtatatgcaactgaaagcggaacattgaatgcaatcgttgtgggtaatactcaaggattagattcaaagaaagacacagctacagtcgtttgggcctcagaagatggtaaatcctggattccaatggagattccatcaaataataactgtccgaaattagtagacccgtccattatacattataatgacgcattctacatttgcggaaaagagacaaaagatgatgctaagggattccagaaattctatacctccccgacattacttgtatggaaaggggtagacagaatgttcatgcttcccggaattcttcctccggtgaaacttgaaggaggaataacacaacatccttctcttcacgaatccagcttcaagggaaaagaagcaaactacacaatggtagttgacagaaaccattatatatggatggtaggcggtcaaggcattgacaaaatctggcgtggtagagttaatagactcggatttctaatacaataataagaagtagttaaatacgaaccttataatcaaaacatgtcctatatagagaaaatagacaaaaatcggattccccagcacatagccatcattatggatgggaatgggagatgggctaaacagcggggaaaagaacgaacttacggtcaccaggcaggcgcagaaacggtacataaaattatcgaggatgctgcacgtctgggggtcaaatatctgactttatataccttctccactgagaactggaatcgtccgcaggaagaagtaacagctttgatgaatctattgctggattctatcgaagaagaaactctgatgaagaacaatatccgtttccgcattattggcgatataaagaaattacctgctgaagtacaggaaggtctgtcaagatgtatagaacacacagctaataatacaggaacctgcctggtactggcactcagctactcttcccgctgggaaatgactgaagcagtccgacagattgcaacgcttgcgaaaacgggagaaatatctcctgaacaaataacagatgaatacataactgctcatctgaccacaaactttatgcccgacccggatttactgatccgcacgggaggagaaatccgactaagtaactacctgctatggcaatgtgcttattcggagctttatttttgtgatacattctggccggacttcgataaagaagaattctgcaaagccatttatgagtatcagcaaagagagcgccggttcggcaaaacgagtgaacaaatcagctaacataattcgaaacatcaaattataacataaatgcattatcgtatttcctttatattcgtaacgtttatctgcctgttctgctttgcagccacgggctttacgcagaataccaacactgacgaagactctaagccagtcatcttatactcaggaacgcctaaaaagtatgagatagcagacatcaaggttgaaggcgtgaagaattatgaagactatgtgttaatcggattatccggactgtccgttggacagacgattaccgtgccgggtgatgagattaccggagcaatcaagcgctactggaaacatggtttgttctctaacgtacagattactgccgaaaagatagaaggcaacaagatttggttaaaaatcagtctgacacagcgtccccgtattgcggatgtgcgctatcatggcgtgaaaaagtcggaacgtacagaccttgaaaacaagctgggtatggtaaaaggtatgcagatcactccgaataccgttgaccgcgcaaagacattgatcaaacgttattttgacgataaaggctttaagaatgcagaagtgattatcgcgcaaaaggacgatccatctaacgaaaatcaggtgattgttgacattgatatcgacaagaaggaaaagattaaagtgcacgctatccatatcaccggaaactcggctatcaaaacatccaagctgaagaaagtgatgaagaagaccaatgaaaaaggcaaacttctgaatctgttccgcaccaagaaatttgttccggaaaactttgaagcagataagcagctgatcatagataagtataacgagctgggatatcgtgacgcaatgatcgtaaaagacagtgtagcacagtacgatgcaaagacggtagatgtatatatggatatagacgaaggtcagaaatattaccttcgtaatgtaacatgggtaggtaacacactgtatccttcagaacagctgaacttcctgctccgcatgaagaagggtgatgtttataaccagaagttgctgggagaacgtacctctacagatgacgacgcaatcggtaacttatattacaataacggttatttgttctacaatcttgatccggtagaagtaaatatcgtcggtgactccatcgacctcgaaatgagaatctatgaaggccgtcaggctacgattaataagatcaacatcagcggtaacgaccgtctgtatgaaaacgtagttcgtcgtgagcttcgtattcgtccgggacagttgttcagcaaggatgacctgatgcgttcattacgtgaaatccagcagatgggacactttgacccagaaaaactgcagccggatattcagccggaccctgtaaacggaacagttgatataggtctgcctttgacatctaaagccaatgaccaggtagaattctctgccggttggggacaaacaggtatcatcggtaagctgagtctgaaatttaccaacttctctgttgccaacttgctgcgtccgggtgaaaactaccgtggtatcctgccgcaaggtgacggacagacattgaccatcagcggtcagacgaatgctaaatactatcagtcatatagtatctcattcttcgatccttggtttggaggtaaacgcccgaactcactttccgtatcggctttcttctcagttcagactgacatcagcagccgttactacaactcgagctatttcaacaactattacaatagtatgtatagcggttatggtggctatggtatgtacaactatggcaattacaacaactatgagaactactatgaccccgacaagtctatcaagatgtggggactttctctaggttggggtaagcgtctgaaatggccggatgactactttactttgtctgcagagctagcttaccaacgctacaacctgaaagactggcagtatttcccggtaaccaacggtaaatgtaatgacctcagcctttcactgactttggcacgtaactctattgacaacccgatcttcccacgtacaggttcggacttctcgctgtcagttcagcttactcctccgtactcattgtttgatggtaaagactataaaggttatttctacgatccaacagatgataggggtattacccaagataatatgaataaacttcatagatgggttgaataccacaaatggaaatttaaagccaaaacatatactccgttgatggattatatcgcacatcctaagtgtctggtattgatgacacgtacagaatttgggttgttagggcactataacaaatataagaaatcgccattcggtacattcgacgtaggtggtgacggtatgactggttactcaagttatgcaacagaaagtattgcattgcgtggttatgaaaacagttcattgacaccatatggaaaagaagggtatgcttatgcacgcctcggcatcgaattaagatatccgttgatgctggaaacaagtactaacatttatgtgttaggtttcttggaggctggtaacgcatggcatgatatctcaaaattcaatccgtttgatttgaaacgttctgcaggtgtcggtgttcgtatcttcttaccaatgattggtatgatggggattgactggggatacgggttcgataagattgacagtagaagcgattacggcggaagccagttccactttattttaggacaagaattctaatataaaactaaaaactaaacgtcatgagaaagtctgttctatccattatgttactgtttgccatcagtatggcagctagtgcacaaaaatttgcattgatcgatacggaatatattctgaaaaatattccggcatatcaaagcgctaatgagcaattgcaggaagctacgaagaaatatcaaagcgaagtggaggtaattgccaaggaagcacagaagatgttccaggactatcaagctcagtcctctactctctctgcggctcagaagactaagaaggaagatgagattgtagcgaaagagaaatccgctgccgaactgaagcgcaaatacttcggtccggaaggcgaactggctaagatgcaggagaagctgattaatcctattcaggatgaaatatatggtgctgtaaaggaactgtcgcaactacacggatacgaccttgtactcgacagagcctctgctgcaggcatcatttttgccaatccacgtattgatattagtgatgaagtgctgagaaaattaggatattcaaattaatttcatacatttgcatcgaaaataactaaaaatcattcaaataaattatagaactatgctaaaaaaaattgcacttgtattgatgcttgcactcccaatgggtgtatttgcacaaaatctgaaattcggtcatattaatgcccaagaaatcgtttcagcaatgcctgaatttgctaaggcacaatctgatattgaagcactagacaaacaactgaccagcgaattacaaagaactcaggaagaattcaacaagaaatatcaggaattccagcaagctatcgctaaggactctcttcctgctaacatcgctgagagaagacaaaaagaactgcaggatatgatgcaaagacaagagcagttccaacaggaagctcaacagcagatgcaaaaagctcaggctgacgcaatggctcctatctacaaaaagttggacgacgcaattaaagctgtaggtgctgccgaaggcgtaatctacatcttcgaccttgcaagaacaccggttgcttacgttaatgagtcacaaagtattaatctgactcctaaggtaaagacacagctcggcatcaaataagaagctataagctataaaataccgaaagggaaagagaaaagaagatcatacttctttctctttcccttttttcatgtaactttgcgtatataaaaccgcactcgtcatgaagcaacatctatctcatacacccggaccaatcggagttttcgattccggatacggtgggctgactatcctcaacaagataagagaggcactgccggaatatgattatgtctatctgggagacaatgcacgcactccttacggtacacgttcttttgaaatcgtgtacgaattcactttgcaggcagtcaataaattgtttgaaatgggatgtcatctcgtcatcttggcctgcaatacagcctctgccaaagcattgcgcagcatacaaatgaatgacttgcccggcattgaccctgaacgccgtgtactcggagttatccgccctaccgttgagtgtataggcgacattactcaaagccgtcatatcggagtactggcaacagcaggtaccatcaagtccgaatcgtatccattggagatacataagctattcccggatattcaagtgagtggaatggcatgccccatgtgggtaccgctagtggaaaataatgaatcacagaacgaaggggctgattatttcatccggaaatacattgaccagctgctatccaaagatcccgaaattgatacgatgattctgggctgcacgcattatcctatcttgctccctaagatacaaaaatacactccgaagcatatccgtattgtcgcacaaggagaatatgtagccgaaagtctgaaggactacctgagcagacacccggaaatgaatgccaagtgtacccaaaacggcagttgtctgttttacaccacagaagcggaagagaagtttgtcgaatcggcctcttccttcctgaaccagcaaatcgacgtaaaaagaatttctctcgaataaatatgggaaagcagatcaatctttccttcttttttgttatatttgtatacataacctcaaatagcataagattatgaaagaagaagattatagcagggccatagaagtattctctggttctccatgggaagcagaaattatcaagggattgttggaaagtaatgatatccgctgcgtcattaaagatggtatcatggggacattagccccctatattgctccatctgtatctgttctggtcactgaagaccagtacgaagccgctactgaactgatcagaagccgcaacgagaaagatactgactgatacggtccagtccttcccggatattctccagcgaattcgcataggagaaacggacatatccttcgcctcccgttccaaaatctataccgggagtgatgccgacatgcgcattttcgagaacatcgaatgcaaagcgataagagtcggtagtgaacttacgtgcatcagcgaaaatataaaaggcaccctgaggctcaactttgatctcaaatcccatttcccgaaggcggctgatcatataccggcggcgttcatcatagatctgtttcatccgttccacatccgagtcagcctgtcgcaatgcggcaattcccgcttgctgagcgatgctggacgcacagataaacagattctgctgcaacttctgcaaagaacgcatgcaggatttcggtgctatcagataacctaagcgcagccctgtcatcgcaaaccgcttggaaaatccgttcaggacaaaagccttatccgtatattccagaatactatgcgcacgtccctcgtataccagtccgtgatagatctcatccgaaataataggaacgcccaaagatgccacacttttcaggaaattctcatccagcaacatacccgtcggattcatcggcgaattaataaaaatacctgccgtatacggagtaacgcacttacggatcgcctctatatcatattgcaaaccattctcttcggacagaggcaccaagacaggttttgcctgggcagccaacacgaagttacgataacacgcatatcccggattggacagaatcacttcactgtccgagttgcaaagcaacatcaagaccagaaggatagagggagaagaaccggaagtgacgacaatacaatccggatcgacggtgactccatattcacgttgataaaaagcggctatttcacgacgcagttccggattccccaaagagtgagtataatgtgtgagatgccggtcgtaggcagccttagcagcttccgccacacaaaccggaacgtcaaagtccggctcaccgacttccaggtggataacgtccacaccttgtttctgtaattcatttgcacgctccaatacatccatcacgataaaggaggtcatttgttctacttggggattcgtatgtttcattgtttttcttttatctgtcaggctgcaaagataattcttttcagcctgtttttgtaacatatcgacaaaaagctctatatttgtactttcaaatcgttagtaaggatgaaacaagagtttacacgaatagcagtaaaagtaggcagtaacgtattggcacgccgtgacggtacattggacgtcacccgtatgtcggcactcgttgaccagatagcagaattaaataaatccggagtagagatcattcttatttcttcgggagctgttgcttcgggacgcagcgagatacacccgcagaaaaagctcgacagtgtagaccagcgccagttattctccgccgtaggacaggctaaattaataaaccgctactatgagcttttccgtgaacacggcattgcggtaggtcaggtactgactaccaaagagaacttcagtacccgccgccattatctgaatcagaagaactgtatgacggtgatgctcgaaaacggcgtcatccccatcgtcaatgagaatgatacgatttcggtcagcgagcttatgttcacggacaatgacgagctttccggactgatcgcttccatgatggatgcgcaggcattgattatcctgagtaacatagacggaatctacaacggttcaccctccgatcctgcctccgctgtcattcgggagatcgagcatggaaaggatttatccaactatatccaggctaccaaatcgagtttcggtcgtggcggtatgctgacgaaaacgaatatcgcccgcaaggtagccgacgaagggattacagtcattatcgccaacggaaaacgggataatattctcgtagacttgttgcaacaaccggacgatacggtttgcacgcgctttatcccttccaccgaggcggtatccagtgtaaagaaatggattgcccacagcgaaggattcgccaaaggggaaattcatattaacgaatgtgccacggatatactcagttcggagaaggcagccagcattcttccggtcggaatcacccacatcgaaggcgaatttgagaaggacgatattgtacgcatcatggacttcctgggcaatcaggttggtgtaggaaaagcgaactgcgattccgcacaggccagggaagcaatgggcaaacatggcaaaaagcctgtagtacattacgactatctgtatatcgaataaaaaatataaaacgtaaaaaggagcaaatgactacaaatttaaacggaactttcgctgctgtacaagctgccagccgggaattggcattgctgagcgacgacaccatcaatcagatactgaacgcggtcgctgatgctgccattgccgaaacaccctttatcctgtcagaaaatgaaaaggacctggcacggatggacaagagtaacccgaagtacgaccggttaaaactgacggaagagaggctgaaaggcatcgctgccgacacacgtaatgtagccactctcccctccccgctgggaaggattttaaaggaaacctcccgccccaatggaatgaagctgaccaaagtcagtgtccccttcggagtaataggcatcatctatgaagcgcgtcctaatgtcagcttcgacgtcttttccctttgcctgaaaagtggaaatacctgtatcctgaaaggtggaagtgacgcagacgattccaaccgtgccatcatcagcgtcattcacaaggtacttgaaaagtttcatgtcaacccgcatatggtagaactgctcccggcagacagagaggctacggcagcattactgaatgcggtaggctatgtagacctgattattccgagaggcagcagcaatctgataaatttcgtgcgcgagaatgcacggattcctgtcattgaaacaggagcaggtatctgccatacttattttgatgagttcggggatacccggaaaggagcggatattatccataatgccaagacacgccgtgtcagtgtctgcaatgcgctcgactgtaccatcattcatgagaaacgtctgggggatttgcctgcgctctgcgatcaactgaaagaaagcaaggttactatctatgcagatacacaggcttatcaggcactggaaggacattatccggctgagttgctgcaacctgccactccggaaagcttcggaacagagtttctggattacaaaatggctgtcaaaacggtgaaaagctttgaagacgcactgggacatatacaagaaaacagttcaaggcacagcgaatgtatcgtgaccgaaaacaaagagcgtgccgccttgtttactaagatagtagatgcggcatgcgtatataccaacgtatctaccgccttcaccgacggtgcacaattcggcctgggagctgaaatcggtataagtactcaaaagctgcatgcccgcggtccgatgggactggaggaaatcacttcctacaaatgggtgatcgaaggcgacggacagaccagatggtaaagtgaggaaacgacaaatgatcaattggacaataacgattaatgatagataaaatgaagaaatttacttgtgtacaggacatcggcgatttaaaatcagcccttgcagaagcatttgaaattcaaaaagaccgcttcaaatatgtagagttgggacgaaacaagacattgatgatgatcttctttaactccagcctccgcacccgcctcagcacacagaaagctgctctcaatctgggaatgaatgtgatggtgctggacatcaaccaaggtgcatggaaactggaaacagaacgtggtgtcatcatggatggtgacaaaccggaacatctgctggaagcgattcctgtgatgggttgttattgtgacatcatcggagtacgttcctttgcccgtttcgaagatcgtgattttgactatcaggagactattctgaatcaatttatccaatattccggacgtcctgtcttctcgatggaggcagctacccgccacccattgcagagctttgccgatttaatcaccattgaggaatataaaaagacggcacgtcccaaagtcgtaatgacttgggcgccacatccccgtccattgccacaggctgttcccaactcctttgcagagtggatgaatgccactgactatgatttcgttatcactcacccggaaggatatgagctggcgccgcaattcgtaggaaatgccaaagtagaatatgatcagatgaaggctttcgaaggagcagactttatatacgccaagaactgggctgcctatacaggcgacaattacggtcagatattaagcaaagaccgtgaatggacagtcagcgaccgacagatggcagtaaccaacaatgctttctttatgcactgcctacctgttcgcagaaatatgatcgttacggatgatgtaatcgaaagtcctcagtctatcgttatccccgaagctgccaaccgtgaaatctcggctacggtggttttgaagagattgattgagggattggaataaacggaacatctgtgaatgaaaccttgcttttattctcgcacctatgagaaaagattctcatgcctttgagaaatttttctcataggtatgagaattttttctcattgcggtgagaactttttctcataagcatgagaatacattgagaatatagcaacatctatttaactgtatactagcacgataacgattgcatcccttcagaattttatgtaaagcgcaaccatttattctagaatagatagaaaaaagccgtacagcaacaaccttagtattctatctcctttcctgccgcctgccaggcattgaatcctttaccaagctccacaaccttaaatcctttttcactaaggatcgcagcagctttcttgctccgtttaccgctacggcaatacaacgcaaccggtttgttcttttgcaacaatgaatccgccatcgaggcaaaagagtcatccatcacatttatattgatcgtttttgcaatatgtccttctgaatattcagccagtgtacgaacatccagacgctgcacttcttcatcctgaatgatagaatcgaaatcctctacattcaccgttttaaagtctcctttctgctgacaggagaaaagagaagagagaaataaaaataatcccacgactaattgattcattttaaacatatgtactatcttaatcagttcacgcccggaacatattcaaatcccggatcacaatacttgcttgattctaccaccacaccacttttatctgtggtatgatacttgaattttatccttatggtttgatgaggattttcttcatccacatatttcgtcagaggaacagaaatgtaagcacggcgattatagttctcctcatccccattcgcatcatgaaacagagacaaagttacgactgtctcatccccctccgactctacgctttcttctatcataccaaacacgtgctgtttgccactattgatattgatcttcacgttcagaatcatattcaaatagtcacgccccagccaaatgctggtcacatctaccggatcatacttcagtccgccttcgaaagccggatcgtcagccccctttggctccggtgtcaccaccgactgcaatgagtatatgacagccgtagcatcctccggatttacttcatagttactgatcacacgcctggccgagttcggagaaatggttgatccggtacggtctttcgcaacagtcaacagctctcccttgtcaggaagcagactctgtatcagaccatccgccccagccttcactgtgacaaattccaacttcacagaaggataatagtaatcatcatcatccccgcaggcagtcatcaggaaaagcattcccaaaagccagagtgtatgtaactttactttattcattggcaagcagctaaatagttcaccaacggattggcatacattaataacaattttccacgcaaaaagtcttcgtctttattcggaatctttattttgcccagttgttgctcgatataggttacgaatcgttgtttctcttcgggagtgtaatgaccggcaaactcggatgtacccttcagcaagtcataggcaacgtaattgcccgaatagatccgatagttactatgaatcctctggtcgatgcaggcagatatactggagaacagttcctgcttcggtaacgaacggtccagctgcgccaacctgtcattgatacagggagcggtctgaaaatgcacttttcctttgtatccgaaaagaccggtctgcatactgatcaaatcgtcctgagtggttttcttatatccttctatatctcttttcaactgaaactcctgcgctttcagaaagtcacaggggtcatattcgtacgaaatggcaagaggagcgatattcatctccatcaaacggtcgatcaagtcgccttcaccacccatcgccagcatcttcagcacgctgtcctgagtacggtcgttcgagtctttggcacgtccttcgcgctgggcaatccagatggactgcttcttctcattaatggtataatgcatataacgggacatccgtgccgaagattccagcatctgccgcatggtcagcgcccgttgtacaataaacgacttgttgacacgcaccagcttcttgatccacggataaaccagcagattgtcgccaatcgctatctcaaccgtatccatcccctgatcgatcagcaagatagagaggaagcccgaatccaatataatatcccgatgattggagagatatgtataagccttgctcttatccggcacagccgtatgatccagagtcagcccatccgtatggtccgccgctattttccataaaataccataacagaatgtttcctgaaaatccagcttgctcttacatgcgcgtattttctgcgccaaaagttcaaaggggacgttcggtatcgcatcagtagccgccttctgaaaagcaggatcagcaatcagctcctcaaaaatttgaggaagttcctcatcattgtaaggacgaatctcatcaaactctgtagtatccataagctatgaagtttagaggcaggtaataggtaataagtaataggtaataggctgcgctatgcccacacaaatttaatatttaatatctattacttattacctgttacctattacttaaaatttattttctattatatcagtcatcacatcctttatatccagaccggcagcacgcacttgctggggaataaagcttgtagtggtcatccccggagtcgtattcacttccagcagattgatcttttcgccggcagtcacaatataatccacacggatgataccggaacagcccaatatgtcataaatggccgaggtcagcatttgcacgcgattcgtcagttcgtccgagatgcgtgcaggagttatctcgtctacctgaccattgtattttgcatcataatcaaagaactcattatgtgtcaccacttccgtaggcgggaagatgacggtcttgtctttggttttatagcagccgcaggtcagctccgttccttccatgaatgcttctacgagcacttcctgggcttcttcaaaggccttaacaatggccggctgtatttgttctttcgtcttaacctttgttacgccgaagctcgaaccgcccagactcggcttgatgaaacaaggcaaaccgatcttttccatcacgtcttcgtcggaaaccgattgcccctgacgcagcagcaacgattctgcaatacgcactccgaaggctttcaggtattggttgcaggtaaacttgtcataggtgatcgccgcagccagcactccgcaacaagagtatggtatgtgcatcatgtcaaagtatccctgaagacggccgtcttcgcccggagtaccgtgaatggtaatataggcaaagtcaaacttaatcttctccgttcccagcataaagctgaaatcgttacggtctaccggcgcttttgcaccatccggcaattgtacttcccaacgggtaccctgcatctcgacaatgtacagtgtgtacttttccttatctatgaaggaatatattccctgtgcactacgcagggatacatgaaattcggaggtgtcacctccggctacgatagcaattgtgcgtttcattctatttctctgttacttatatagcctcgccacttctcgataagctgggtcatgtcatccggaagttcggaagtaaagtacatctcttcgcctgtgacgggatgtacgaaccccaatgtcatggcatgcagagcctgccggggacaagtgtcaaagcaattatttacaaattgtttgtatttactaaagtgagtacctttcagtatttcgtgaccgccatagcgttcgtcattgaaaagtacatgcccgatatgtttcatgtggacacgaatctgatgagtacgtccggtttcgagtatgcactctaccagcgtgacatatcccagccgttcaagcacccgataatgagtgaccgcgtgcttgcccatcgccgggtcggacataaccgccatctgcatccggtctttcggattacgggcgatactgcctacgatcgtgccttcatcctgttccacatttccccagacaagggcacggtatctgcgtttggtcgtcttattaaagaattgtattccgaggttggtcttggcatccggtgtcttggcaatcaccagcagaccggacgtatctttatcaatccggtggacaagaccgacgtgcgggtcattggcgtcatattcgggaatatctttcatgtgccatgccagtgcattgacaagcgtaccgtgatagtttccgtgtcccggatgtaccaccagtcccgcaggcttgttcactaccattacatatggatcttcgtaaacgatattaagggggatattttcgggaataatctcgttttcgtaacgagggcggtccatcatgacggtaatgacatcgagcggctttaccttgtagctgctcttcaccggcttaccgttagccatgacaaatccatcttcggcagccttctgaatgcggttgcgcgaagcattgacaatacgttcgaacagatatttgtcgactctgaccatcgcctgccccttgtctacgaccacccgaaaatgttcgtaaagctgggattcatcaccgacaggttctatatcatccaaatcattttccagttcatccggaagttcttcctcgatcatgtgagtctgtttcgttatttatcaattaaaaccagctatcatcctgacttgaaggggattctgaggaaacaggttcatctgctccttcagcattttctatggagtcgctttccaacggttcgttttctccgtttcctaccatcagggtcagcgcagctcccaaaggtactttatctcctgcttccaatgaacgtccctgatatttaatgccgtacacccaatccttctcaccatgcatcagttgaatctcggtcaacttgaatccggcagcaagcactttcgcctgtgcctggcgcagagaactgttgtccgccacatcgggaacagcacgtaaaggaatactcagtgtattgatagtcaggtaaatggtgcggccttctttcactttttgtccgattcccgggttgacatcaagtacaatgccagctgccatattcttcacataattagaatcggaaacgacacataccaatccgtgattgcggaacatttttgaagcttcatccacagtcatcccttttacatcgggcacaaccaccgcctcaccgtgacgagtataaacatccagccatttcatcacgccgaacacaatcagcaccactgccacaatcatgacaaggatattcacccagaaatatttatttgttttaaaagaaaagaattctttgattgtcatacgctttgctgttaatccgcgccaaagatactacaaattagttgaatttcggaatagtgggcaatgaaaatgtccctgcataaatgcaaggacacctgtcatcaccacaattgttgcaactatattccccactcctatagatttcaacaaccttatattctaggatgcggcttccggattctctgagcacaaccgtctgtcgcatatattccgtctatgatctgtgacaaagaaagctaaaaagtgacaaagagcattccattaaacattatttaatactctatttaactactgtgccaagagtcctgtactttttatcataaaaaggaagttataaccaactttaatgaaaatagaagcaaacaaaaaaggcggagtttaaaactccgccttttttgtttctgagtgatgattaccacttctgtccgttgtactcatcagaaacagtcagtttctttctgcctttcgcacggcgagcagctaatactctacgaccattagccgatgccattctctcacggaaaccgtgtttgttctttctctttctgttagagggttgaaatgttcttttcattactgtatcttgtttttatgttattattctacgtaatcgggctgcaaaaatagagactttttttaaattaaccaagcgataagtcatttttgctcaaaagtttttgtgttttttactgatttagattacttttgcactcgaattacgacgaagacaattaaataacaataatataataagaaaaacagcagtatgattaatgctcaagacatcaaaaacggaacttgtatccgtatggacggaaagatctatttctgtatagaattcctgcatgtaaaaccaggtaaaggtaacacatttatgcgtaccaagctgaaagacgtagtaagcggttatgttctcgaacgccgtttcaatatcggtgaaaaactggaagatgtacgcgttgaacgtcgtccataccaattcctgtataaagaaggagaagactatatcttcatgaaccaggaaacttttgaccaacaccccatcgctcacgacctgatcaatggtgtagacttcttgctcgaaggtgcagtgctggacgttgtttctgacgcttctaccgaaactgtactttatgcagacatgccgatcaaagttcagatgaaggttacttatacagaaccgggaatgaaaggtgatacagccaccaacacactgaaacctgctaccgtagaatcaggtgcaacagtacgtgtgcctttgttcatcagcgaaggtgaaacaattgaaatcgacactcgtgacggttcttacgtaggacgcgtaaaagcataaatgtcatacaaatgacataaagaaacggtggatttgcttcggcacttccaccgttttttattacctttgtccatcactaaccctaatattaagatacaaaagaatgaaaaagttgatttacacactgctctttgtccttatttccgttgcagccaacggtcagcaggcaaagtatgtattctatttcatcggagacggaatgggagtcaatcaggtaaatggtacagagatgtatcaggcagaactgcaaaacgggcgcatcggcgttgaacctttattgttcacccaatttccggtagcaacgatggcaaccactttctccgcgacaaactctgttaccgactctgccgctgcgggtactgcactggctaccggaaagaagacctacaacagtgccatctctgtaggagaagacaaaaacccgattgaaaccgtagccgaaaaagccaagaaggccggaaagaaagtaggtgtcactacttccgtcagcgtagaccacgccactcctgccgctttctacgctcatcaggcagaccgtaatatgaattatgaaatcgctgtcgacctgacaaaagcaaactttgacttctatgcaggcggtggttttctgaaaccggacaagacgtatgacaagaaagacgctcccaacatcttccctattttcgaagaagcaggttacaccgtagcacgtggctacagcgattataaagccaaaagcaaggatgccggcaaaatgatcctgatacaggaagaaggcaaagatccatcctgcctgccttatgctatcgaccgtaaaagcgacgacttgactctcgcccaaatcacagaaagcgcaatcgacttcctgaccaaaggcaagaacaaaggattcttcttaatggtagaaggtggaaagattgactgggcttgccacggtaatgacgccgctaccgtattcaatgaagtaaaggacatggatgacgctatcaaagtagcttacgaattctacaagaaacatccgaaagaaacactgatcgttgttacggccgaccacgaaaccggtggtatcgtactaggtacaggcaaatatgcgttgaacctgaaagcattgcaatatcaaaaacattctgctgacggattgtccagacgtatcagcgaactaagaaaatcaaaaggcaacaaagtgacttgggaagacatgaaagaattcctgggtgaagaaatgggcttctggaaacagttccctatttcctgggaacaggaaaagaagctgcgtgacgagttcgaacaatcctttgtcagaaataaagtggtatttgccgaaagcatgtactctaaaagcgagccgatggctgcacgcgctaaagaagtaatggaccagatatctatggtaggctgggtaagcggcggtcactctgccggttatgtgccggtatttgctatcggtgccggttctcaactgttcggtgagaagattgacaatacggaaattccgaaacggatagctaaagctgccggatataaataaagaattgactgcacgaatatgtaatcaaaacactatttattttcatttaggcacggatttcacggattaacacggttctattcaattaaagaccgtgaaattcgtgcaatccgtgcctaaataatattatcattataatagatgattttcattgggtcccttctcttgatatgtttcctgttaggaaacgggcgttccctcaccgagaaacgagagttacctttaaaggaaacgatcgttcccacaccgggaaacgacagtttccaaagcaggaaattcatggaaactctaagccattcatatacaatcaattagtcatatcatacctatgtctattggagacatgaagagagactagagtgtacttacaaattcattacatcctgttcgaaccgatctttatctccggcagctttattgcgcattctgctccggtaattatagatagttgccaaagaataacccagaaaatgagcaatcttgttactatccactactcctaaacgaataagggcaaagatccggagttcggttgtcagcagttcgtctgattttggataaactcttgcttcttctaccagcagattattgaaagaagtaataaagtgtgggaacagtttaaggaatgacttatcaaattcgttataaaattcattccgctcgtcccggataaactgttcggacttgattgctttaaacaagtcatcgatacgtgacgacatagcaagtttggccagagagcggcgataagtttccagtttatctagataattgacgcatctgtccaaataacgggcaatatatacttcctttatctttccggtctgttccaattctttgttgaccgcagacatttgtttgttggccaaacttagattcctacgcatgacggatattttcttcatccaacgatacagatagaaaatagcaatgaggagaaacagcgacaacagactgacactaatcaacatggcacgggaaacggcccgttctctctcttctttcagtttataagccttatcaataatcgggaaaaactccgtcacttccataaatcgcaaacgggcattacatgctacagcatcttccatcgaacaactcagatatttgtaagcacggtcaatatccctagttcatacatcagatgcgcgagtttctgcaaggaagcatactccctgacggaagattccaagtctgcaatagcagtcagtatcagataataaacttctttctcaacgtctttcttcatgctatatgcttcggaaagggtataatagatatatactttctgacgttcgtcttccatatctttcagtgcatcgttcagcatgccgatagccgtatcggcctttccggtcacgatacatcgttccgccataacaatcgttttattttcttccggaggcatggcggcgataatggaatctctgtacaaatcggtctttttcaggtatttttctttttcggttttgtttgtcgtataatcagcgagccagccgtagcaggcgcgataggtctggtaataagaaagcaaagtccattcattcagttttttaggatcaatcttctccaattgttccatagcttcgatgtacatgcccattacacccattaccgtagcacggttaatgacaatctcatattccaggtccggacgatttaattggggcaatatctccatctgacggttaatataatgaagcgccgaatctgcctgataatgaaggtaagccccaaagagggaggcatacaactcataattccgggcaggatcggtggaatgggcaagttgtacttttaaatcagtaatgtctttttctctccgtatctgataagtttccttcttacttataatgtcatccagttttttaagggccgccttatttatatccgtatgctttgcggacaaggaaagaggataaacaaaaagaagaaacaaaagataataggttagatttctcataaggtgcttttttaagatgtgacaaatataatgattatagtaataaaaacgaaaaatatcgccataacaattttcattttcacttgtatttttcgacagaggcaataacgataaaaagcttattatcaacagcctattcaaaacaagcatttatattttctttctaactgccatacggcatacccgattcacctacatttgcatcatcggttcccccgaacaaattttaaaaatcctcaaatccgcaactaagcccttgaacgtccttattgcgtttacacgtcctctcattactgaatttgcagataatttgaacttgaagcacccacttctgcctacaatatccccttaccccacaatgtgacttgaggcaatacacaatatcattcccataagttgtaggcattatccaaaatcagtctggaaaacatctgcgtaagcattattacaggtatagatgttcagcacataccgccttgatgtcctgatccacttggctggtacagagataaacctgaagacaaacgcttttatgcgacttgttgcattgagcccgaacttctttacgtcaagtctttgaataatggccttgtaaaagttacggataagtgctgtaagaagaaggaacactgtgttctctgccatgaaggatttgggcaatctgtcccacccgaaaccattgttcatatcatcgaagatacgttcctttcctccacgaaggttatagaactcgacaatttctcttacggaagaatcatagtcgttagtcaggatacaacggtatgtgtattctccttcccaaaaatcctgcacaccatccatccgtttctgtctttgaatcacaagtcgatatgccttacctttccacttctcaacaaggatagagttcaattcaaactcaatgccattgatttcctcagttttccagcctttgagagcaaaggtgtcattgtagatcgaactgcagcggttagcacggatatagaaggacttgcagtgtttttctatttcctccacgatttcctcggaacatgatccacaatcagctctgaagcgattgatagtgagcccattctgttcaaatctcgcaaagaacctcttcagcgtgtccttctgatggaaacgaacatttgtgttaccatcgctattctctataccgactatcaaatcgccaataaccgccacgccagggcgataaccaaggaacttcttgtatgtaggctttgcatcatacttctctgtctctatgaactgatggtcgaaatcaacatcatacatctcaccctctttcagttggccagatgcaaatatacaattgagcaataaagtattgagagtgtcagccgtattgaaatcgtaggtcttgcccatatctgatgtgtatgaaatgttttcttgcgtcaactcctttatcgccctgaggatagtatcagagctacaagtgcgaagtgtcggatgaagcgagaggtggttcatcaaatgagtagtgacatcctcaatacatgaaccgctacagaagtagatactcatgagagaacggatgatttcgctgtactgataaccgaacgatctacaccttagaccgagggttgagtcgattacagatgataatgtggagtcaaattgctccatgattgaaaataatcccccaaaaggagtgagtctctcagatttaatttgtatcttcgccatgtctatcgtcggattctcttgttttttttgcaacactaagataagtgaaaattctgacatggcaaaatcctgagcaactttttgttgctcaggtacttaaaaagtttaatttataatagtgttgcggaattaaggaaaatctagttaccatgaaaaggaatttattattcattatcttactattattattacccggtcttcaccaggtattcgcaacaagcactataaagaaagtagccccgaccttttggtgggcaggaatgaagaatcccgaattgcagatactattatatggtgaccgcatatcatccgcagacgtcagtctttctgccgataatatcacgctgcaagaagtggtgaagcaggagaatcctaattatctggttctgtatttagacctttcgaaggctgctccacagaactttgacatcatcctgaaacaaggcaaaaagcagacaaaaatcccttacgagcttaaacagcgccggccgaatgcttcggcagtagaaggttttgattcgagcgacgtgctttatcttattatgccggaccgttttgccaatggcaacccctccaacgacatcattcccggaatgctggaaggaaatgtagaccgtaatgagcctttcgcacgtcatggcggtgatttgaaaggaatagagaatcatctggattacatagcagacctcggagtcaccagtatatggctcaacccgattcaggaaaatgacatgaaagaaggatcgtatcacggttatgccattaccgattattatcaggtagaccgccgcttcggcagtaacgaagagttccgcaaacttactcaggaagctaatgccaaagggctgaaagtcgtaatggacatgatcttcaaccattgcggttcggacaactatctgtttaaagatatgccctccaaagactggtttaactttgaaggcaactacgtgcagaccagcttcaagactgccactcaaatggacccgtatgcttccgattacgaaaagaaaatcgctatcgacggttggttcacactgaccatgccggacttcaaccaaagaaaccgtcatgtagctacttatctgatacagagcagtatctggtggattgaatacgccggtatcaacggcatccgtcaggatacacacccttatgccgacttcgatatgatggcacgctggtgcaaagcggtcaatgaagaatatcccaagttcaacattgtaggtgaaacatggctgggcaacaatgtactcatctcctactggcagaaagacagcagactcgcttatccgaagaacagcaatctcccgactgtcatggacttcccgctaatggaagagatgaacaaggctttcgacgaagagactaccgaatggaacggaggacttttcagactctacgaatatctatcacaggacatcgtctacagccatccaatgagcctgctgaccttcctcgacaatcacgatacttcccgcttctaccgttcggaagcagatacaaagaatctggaccgatacaagcaagccctgacgttcttactgacaacccgcggaataccgcagatatattatggaactgaaatcctgatggcagccgacaaggcgaatggagacggcctgctccgctgcgacttccccggaggctggccgaacgatacaaaaaactgctttgacgcagccaaccgcactccacagcaaaatgaagcattctcttttatgcaaaaactgctccaatggagaaaaggaaacgaagtcattgccaaaggccaactcaaacatttcgcaccgaataagggtatctacgtatacgaacgcaaatacggtgataagtcagtcgttatttttctgaacggaaacgaccgggaacagaccatcgacctggttccttaccgggaaatactccccgcttcatctgctttcgatttattgacagagaaaaaggttgaattaagaaatgaattaacacttctaactcgtggaatatacatcctatccttttaataagttcacttcaacttatatttatcaggatgcaataatataataaactactgtaaaacaaaacattgagatttatataaacttgtatttttattctagacagcccaaagtctcaagatggttgctatatttgcaatatccggaacagagcggagtaaaaatattagttagcttataatttaataccataaatagaatgaaaaagagaaagattttatcgctcatcgcattcctttgcatctcattcattgcgaatgcccaacagaaattaacctcaccggacaacaatctggtaatgacctttcaagtagactccaaaggtgccccaacgtatgaactgacgtataagaacaaagtggtaatcaaacccagcactctcggactggaactgaagaaagaggataataccagaaccgacttcgactgggtggaccgcagagacctgaccaaacttgattcaaagaccaacctgtacaacggcttcgaagtaaaggatacccaaacgactacctttgatgaaacctggcaaccggtttggggagaagaaaaagaaatccgcaatcactataacgaactggcagtcaccctgtatcaacccatgaacgaccgctctatcgttatccgtttccgtctgttcaatgacggtctgggattccgttatgaatttcctcagcagaagtcactcaattacttcgtgatcaaggaagaacattctcagtttggcatgaacggcgatcatatcgctttctggataccgggtgactatgatacgcaggaatatgactacaccatttcccgcttatcagaaatcagagggctgatgaaagaagcgatcactccgaactcttctcagactcctttctcacagacaggcgtacaaaccgcactgatgatgaaaacggatgatggcttatacatcaatcttcacgaagccgctttggttgattactcatgtatgcacctcaatctggacgacaagaatatggtattcgaatcctggctgacaccggatgccaaaggagacaaaggatatatgcagactccctgcaacacgccttggcgtacggttatcgtgagcgatgacgcccgcaatatcctcgcttcacgtatcactctcaacctgaacgaaccttgcaagatagcagatgccgcttcttgggtaaaacccgtgaaatatatcggcgtatggtgggacatgatcaccggaaaaggctcatgggcttacaccgacgaactgaccagcgtaaaactcggtgaaacggattactccaaaacaaaaccgaacggcaaacattctgccaacacggccaacgtgaaacgttacattgactttgctgctgctcacggattcgatgcagtactggttgaaggctggaacgaaggctgggaagactggttcggcaacagcaaagactatgtatttgatttcgtgactccttatcccgacttcgatgtgaaggaaatccaccgctatgcagccagcaaaggaatcaaaatgatgatgcatcacgagacttccgcttctgtacgcaactacgaacgccacatggacaaagcctaccagtttatggcagacaatggatacaactccgtaaagagcggttatgtaggcaacatcatcccccgcggcgaacatcactacggacaatggatgaacaaccactacctgtatgcagtgaagaaagccgccgattacaaaatcatggtgaatgcacacgaagcaacccgccctaccggtatctgccgtacatatccgaatctgatcggcaatgaatccgcccgcggaacagaatatgaatcattcggaggcaacaaagtatatcatacaacaattctgcctttcacacgcctggttggcggtccgatggattacactcccggcatcttcgaaacgcattgcaacaagatgaatccggcaaacaattctcaggtacgttctaccattgcacgccagttggcactatacgttaccatgtacagtcctttgcagatggctgccgacattccggaaaactacgaacgctttatggacgctttccagttcatcaaagacgtagctctcgactgggacgaaacgaactatctggaagcagaaccgggagaatacatcacgattgcccgtaaagcaaaaggtacggacgactggtacgtaggctgcacagccggtgaaaacggtcatacctccaaactcgtattcgacttcctgactccgggcaaacaatacatcgctaccgtctacgcggatgccaaagatgccgactggaaagagaacccgcaggcttataccatcaagaaaggtattctgacgaataagagcaagctgaacctgcacgcagctaacggaggcggatatgctatcagcatcaaagaggtaaaagataaatcagagataaaaggtatcaagagattataaagacagagaaattattattcggtaaaagagagtgttttcgagcactaaaaatgatgacgaagagaaggttttcaataggtatttcttaagagagaatgaatagagattttacaattaactttaaagacaaaaacatgaaaaaaggaaactttatgttcaaggtcctgcttacgcttatagccggaatattcttgtccgttgacgcatttgctcaacaaatagccgtcaaaggaatggtaaaagacgcaacaggcgaaccggttatcggtgccaatgttgtggtgaaaggcactaccaccggaacgattaccgatttcgatggcaacttccagttgtctgccaagcaaggcgatataatagtagtttcatttatcgggtaccagccgcaggaacttcccgtcgccgcacaaatgaatgtaatactgaaagacgatacggaaatactggacgaagtagtagtcatcggttacggtcaggtgaaaaagaacgatatgaccggttcggtaatggctatcaagcccgatgaactaagtaaaggtattacgacgaatgctcaggatatgttatccggtaaaattgccggtgtcagcgtgatctccaatgacggtacaccgggcggtggcgcacaaatccgtattcgtggcggttcttcattgaatgcaagcaatgacccgctgatcgttattgacggtctggctattgacaacgaaggtatcaaagggatggcaaacggtttgtcaatggttaaccctgcggacatcgaaacccttactgtactgaaagatgcctctgcaactgccatttacggttcgcgtgcatccaatggtgtcattattatcaccaccaagaaaggaaagaacggacaagctcccagcgtaagctataacggctccgtatccttctccaaaactcaaaaacgttatgatgtactgagcggagacgaataccgcgcttacgccaatcagttatggggtgacaaattaccggcagatttaggaaccgccaatacagactggcaggaccagatattccgtacagctgtcagcaccgaccatcatgtttctatcaacggaggattcaagaacctgccttaccgtgtatctttaggttatacagacgacaatggtattgtgaaaacatccaacttccgacgcttcactgcttccgtgaacctggctccttccttctttgaagatcatctgaagttcaacatcaatgccaaattcatgaacggtaaaaaccgctatgccgatacaggtgccgccattggcggggcattggccatcgaccctacccgtccggtttattctaacgaagccccttaccagtttacaggcggctactggcagaatattaattctaccacaggtttcagcaatccggactggagatatacgtccaatccgaactctccccaaaatccgctggctgcactggaactcaaaaatgacaaggcaaacagcaacgactttgttggaaatgtagacgttgactataaattccatttcctgcctgacctccgtctgcacgcaagcataggtggagaatatgcggaaggtacgcagactacgattgtttctccatactcattcggcaataattattatggttggaatggcgacgttacccaatataaatacaacctttcgtacaacatatatgtacagtatatcaagtctttgggtgcaaacgactttgacatcatggtcggtggtgaagaacagcacttccatcgcaacggatttgaagaaggccagggctgggactcctatacacaagaaccccatgacgccaaattgcgcgaacagacagcttatgcaaccagaaatacactggtctcttacttcggccgtctgaactactccctgctgaaccgttacttgtttacctttaccatgcgttgggatggctcgtcacgtttctccaaagacaaccgctggggtacattcccgtcattggcactgggatggaagattaaagaagaaaacttcctgaaagacgtaaatgtcctgtctgatctgaaattgcgtttaggctggggtattaccggtcagcaaaacataggtgatgattttgcttatcttcctctgtatgtagtcaataacgagtatgcccagtatccttttggcgatacgtattactctacttcccgcccgaaggctttcaatgaaaatctgaaatgggaaaaaacaaccacatggaatgccggactggacttcggattcctgaatggaagaatcacaggcggcatcgacggatacttccgtaaaacggatgacctgctgaacagcgttaagattcccgtaggaactaacttcaatgcccagatgacacagaatatcggttcactggaaaactacggtatggaattttctatcaatgccaaaccgattgtgactaaggacttcacttgggacctgagctataacattacatggaaccacaatgaaatcaccaagttgacaggtggagacgacagcgattattacgtagaagcaggcgataagatttccagaggtaacaataccaaggtacaggcgaataaagtaggttatgctgccaattctttctacgtttaccagcaggtatacgacgaaaatggcaaacctattgaaaatatgtttgttgaccgtaacggaaacggaacgatagacagcggagacaaatatatctacaaaaaaccggcaggcgatgttttgatgggactgacctccaaaatgcagtataagaactttgacttcagcttctccttacgtgccagtctgaacaactatgtgtactatgacttcctgagcaacaaagccaacgtcagcacttcgggactgtactccaataatgcatacagcaacaccagtgccgaagccgtcgcactcggtttcagcggacaaggtgattactacatgagcgactattttatacataacgcatcattcttacgttgtgataacatcacgttaggttattctttccagaatctgtggaaaactcaaacctacaaaggtgttggcggacgtgtatatgctactgtacagaatccgttcattatcagtaagtacaaaggccttgatccggaagtaaaaagcggtatcgacgccaatccatatcccagagcgatgactttcttattaggtttaagtctgcaattctaacattcattaaatcaatttatcatgaaaacaaaatatatcaaacaactattttcagccgcactgatcgcagttctctcttcgggagtaacttcatgtatcaacgatctggatattagtcccatcgaccctcagacaggaagtagtttcgaccaacagggagtatttgtgaaaggatatgccatgctgggtgtaaccggacaaaagggtatcgacggttctcctgacctcgacggacaggacgaaggcgaatccggtttctatcgtaccactttcaactgcaacgaactgcctaccgacgaatgtctttgggcatggcaggagaatcaggacatcccccagcttacaagcattagctggagtccttccagccagcgcacagagtgggtttacgtccgtttgggatatgacatcacacaatacaacttcttcctcgaccagaccgaaggcatgacagatgcagaaacactacgccaacgtgcggaaatacgtttcctgcgtgccctccattattggtacttcctcgacttgttcggtaaagctccgttcaaggaacactttaacaatgacttgcctgtcgagaagaaaggtacggaactctatacctacattcagaatgaactgaacgaaattgaaggtgatatgtatgaacctcgccaggctcccttcggacgtgcagacaaagccgccaactggttgctccgcgcacgtttgtacctgaacgcaggcgtatacaccggacaaaccgactatgcaaaagcggaagaatatgccagcaaagtgattggctcagcatataagctatgtacaaattacagcgaactgtttatggccgataacgacgagaatgaaaatgccatgcaggaaatcattctgcctatccgtcaggatggagtgaagacgcgtaactatggcggttcaacttatctggtttgtggtactcgtgtagccggtatgccccgtatgggaacaaccaatggctggtcctgtatctttgcccgtgccacaatggtacaaaagttcttctccaatctcgatgatgtgccgatgctgcccgccgatgttgaaattccgaccaaaggcttagatacagatgagcagatcgatgctttcgatgcaaaatacggcatcagaacagaagatatgattaaagctgccggtgacgaccgtgccttgctatactctggtgtaggaggtggcagacgcaagattcatacagatgcgatcagcggattcaccgatggcttgtcgattgtaaaatggcagaattaccgttctgacggaaaacctgtcagccatgctacttatcctgacacagacattcctttgttccgtctggcagaagcatacctgacacgtgcggaagccattttccgccagggaggagacgccacaggagacatcaatgaacttcgcaaacgcgccaactgtacaagaaaggtacagaccgtaaccgaacaggaacttatcgacgaatgggcacgtgaattctatctggaaggtcgccgtcgttcagacttggttcgtttcggtatgttcacaaccaataaatatctttgggactggaaaggcggagcaatgaacggaacatctgtcgcttcatactacaacaaatatcctatccctgtatcggatatcaacaataacaggaatatgtcacaaaatgaaggctataaataaccaagagttcatccttatataaaagaatgccattatgaaaaaaatatccaacatattactcgctgtcaccttcacactgcctctatttacagcctgcgaaacagacaatgacagcaatccgatcctgaacgaacccgatacattcacgctcaatacgcccgcgtatgcagccaacaatgtatatgacctgaagaatgcccagactgtagaactcacttgttcgcaaccggactacggttttccggcagctaccacctacacggtacaagcttcatttgaacaggatttcatagaagcgacagatgagagcaaagccaactatacagtgttggaaagcacctccccgacagcaaagatcaatgtggatgcttccgaactcaacaatgcgcttctcgacttgtggacggccgtgaacggagagcaggcagaactccctaccaaaccggtagctgtatatatccgcctgaaagccaacatcacaagcagtggaaaaggagtatgtctttccaatgtgattgagttgcccaacgttctgatttccaagagcaccagctcattgacacctcccaagacgatgttcattgtaggctctatgctggatgccgactggaaagtatggaaaccgatggcaggtgtctacggtatggacggtcagttctattcaatgatttacttcgatgccaactccgagttcaagttcggaacaaaggaaaacgagtatatcggcattaacgacaaccgcgtgacggttaccgacaaagccggagcaggagtcagcggcagtgacaacttcgtcgtagaaaacgccggatggtatctcttctacgtcaaagcggctgtcaaaggggatgactatcagtttaccattaccttctatccggctgaagtatatttgttcggtaacaccaccggcggttcgtgggcattcaccgacgaatggaagtttgcggttcccgccaccaaagacggtaacttcgtatctcctgccatgactgcaagcggagaagtccgtatgtgcttcaagacagacctcgactggtggagaactgagtttacactccatgacggtgaaatcttctatcgtgatttcaaccttattgacagttggacagaaaagggagacggttattccgtacagggttcagccggcaatgtgatccacctgaacttcacggcaggtacaggagaaaagaagtaattaactttaaaaagaacgattcatcatgaaaaaacatttaatatacacagggatgtttctggcagcaatcggattttctgcctgtaacgaagatttcaaggactgggctgatccccagtccaatccccaggaagagtcggcgggacagttgactgcaactttcacagcaggcaaggacgccagcatcgtcatggacgcggccacagccgattccgtagaaattgcaaagttaagctcgaccacagccgaagagggcagtaagatcgctgtcaactctttgacactgaatgagaatcacaccattccattttccatgacggaagatcatgtctttaaagtagccttggcacaactggacagtgtgacgcaggaagcctacaaaagccgtgcaagcgtggtacgtgaattgaaaatctctatcaatgcttctgccgtaactccttccggtgaaggtattcaactggtgggaaatgaagtaagcatcaccttgcagcctgccacaactccggcccttgatcccgacggctattatatagtcggtgattttacaggctgggacggcaacagtgcccaacagatgaagaaggacgctctcgatgaaaacctgtatatactggaagcagaaatagaaagtatttcgaacttcaagattttcccggcttcagctattaacggaaacgacatagactggaccaaagccttaggaagtagtgtagatggtgatgactccggtgataattttgttagctggacgaatgcgggagccattaatacagcactggacggtaaaatcaaaatctcgttcgatgccttcaactaccgttttacagtgaaagacaacagtgcgcccaccgaactttacatgactggcagcgcatacaactggggaactcctgccggtgatccgaatgcttggaaagcacttgttccggtcaacggaacgaaaggaactttctggggaatcttctatttcgcagctaacgatcaggtgaagtttgcaccgcaagccaactggggcaatgacttcggctttgtagatgctatctcacaggaatccaaagaccttgccggattgtcggacgagggcggcaatttgaaagtcggtatagccggctggtacttagtatacgtctccgttatcggtgatgataaagtgatagaatttgaaaagccgaatgtatatctgatgggcgatacctcatacaacggttgggacgcgcaactggtagaacaggatttatttaccgtgcccggaacggctgatggtgaatttgtttctccggcattcctgaaagatggcgcagtacgaatctgcgtaaatccgaaagctgtctctgccggcgactggtggaaaacagagtttatcatcttcgacggacaaatagcttatcggggcaacggcggtgaccaagctgcggtacaaggtaaaatcggacaaaaggtttatctgaacttcggcaacggaacaggtcgtatcgagtaatactacaagaaatcagggaaacagggaatggccgtcgcgaatacaatgaaatcggggcggccactgttttttaagaaactacacttattgtctttaatacatcatcattatgaataaacatctccactttttatctcttttgtggttatcaatgctcatggcattcatgaccgcttgcagcgatgacaaaaatatcaccgaccctgctccggaacccgaaccgcccgtcgaagggcaatggaccgcacttaccgcctctcccgacacatgggacgagaccaaacgggcagacatctcctaccagttactggtctattccttcgccgacagtgacggagacggatatggagacctgaatggcgtcacccaaaagctggactatctcaaccagctgggtgtgaaagccctctggctctctcccatccacccctgtatgtcttaccacggatatgacgtcacagactacaccaaagtcaatccgcagctcggcacagaaagcgacttcgaccgcctggttacggaagcccacaaccggggcatcaagatttatctggactacgtaatgaaccacaccggcactgcccacccgtggtttaccgaagccagttcatcatccgaaagcccgtatcgcaattattattctttctccgaagacccgaagacagatatcgcagcaggcaaaatcgacatgatcacccaagaaggagcagccggatacaatgctgcagaatggtttcaagtttctgacgagaccgctgccgtgaaaggactgatgaaatttacactggactggagcaacgcatcttcccccatccttgtcgtttccacaggaaccaaagcagacgaggataatccggacacaggcaccgacaacgccaaatacttatactacggagaagacatctgcaaaaagttttatgacaaaggaaacaacatctatgaactcaccgtcgactttgagtccacttgggggcttctgatccgtaccagcaatgcttcttcctggccatccggaacaaaatacggcgcctcttcctcgtccgagaaactcgcactgaacaaggatttcaaactgaccaacgccggcagccctgccaacatcatgttcgacagccagcagatcacctatttccattctcatttctgcaccgactggtttgccgaccttaactacggccctgtaaaccaggcaggagaatcaccggcatatcaggcaatagcaaatgccgccaaaggatggattgcccgtggtgtagacggcctccgcctcgacgccgtgaagcacatctaccacagtgagaccagcgaagaaaatcctcgcttcctgaaaatgttctatgaggatatgaacgcctattacaaacaaaaaggacatacggacgacttctatatggtaggcgaagtgttgtcggaatacgataaagtggctccttattataaaggtctgcctgccctttttgaattttctttctggtaccgactggaatggggaatcaacaacaataccggatgttattttgccaaagacatcctttcttaccaacagaaatacgccgactatcgaagcgactacatcgaagcaacgaaactgagcaaccacgacgaagaccgtacatcatccaagttgggcaaatccaccgacaaatgcaaactggcggccgccgtcttactcacttccgctggacatccttacatctattacggtgaagaactgggactttacggaacaaaggataatggagacgaatatgtgcgcagcccgatgctgtggggagatagctacactaccgactacacagacaagacagatgccaccgtttcgaaaaatgtgaaaacggtagcagaccaacaagccgatacccattcacttctgaacatatacctctccctcacccgattgcgtaacacctatccggcactggcagaaggaagtatgaccaaacattccgtctacaacgaatcacaggaaaaagactataagccgattgccgcctggtatatgaccaaggacaacgagaaactgcttgtcatccacaatttcggcggaacggccatgcaacttccgctgacagacaagattgaaaaagtattgtttgtgaatggcgaggcgcaacaaaatacagacagcgacagttacaccttgaaactgggaggatatgcctctgtagtattcaagttgagcaactaaatatatcaagaccacgtcttcatacattcatcatctaaaaaatagaatgaatctgaagacgtggtcttgactttttacggtttctatccgtctttaagaaaccttatatcagtcgaaatatcagctttttaatgaataagaatcaaacttgtgtttctccttctatatactcttccaagaaaagattctccccatcgaatacagcgtacgaaaagaagttgatccagtctccaagaatcagcacacgggaagtagcgctcaacattaaatccagttcaatgtgacgatgtccatagatgaaaaagttgatattaggatgactcttcagatattcttttgtataaagtaccagatgttccttattctcccccatgtaatccggttctttgccgtccacccgcttttcgcggctatgttttgcccacgtcaagcccagttccacactccaacggggatggatggcagaaaacagtgtctgaagtgttgcactatgaaacatccagcgcaacaacttgaacttcttgtccgggtcacccaatccgtcaccgtgagccagataaaactcttttccgtatatttcggtagtcaatgcttcgcgatgaataatcactccgcattctttagaaagataatccccacaccagatatcatggttgccggtaaaaaaatgtacctccactcccatatccgtgagttcggagagctttcctaaaaagcgggtgtatcctttgggaaccactaaccggaattcataccagaaatcgaacatatctcccaacaggtaaacggcagaagctttatgcttgatactgtcgaggaagttcaccaagcgccgttcctgtgtacgtccatgttctatggcacgtgaaccaagatgcgcatcggaaaggaaataaacgttcttcatgagttttgagtttagagttatcagttttatgttttgagctatgaatttacaggaatccgagttccagttttgcttcctcactcatcatatctttatcccattccggttcgaacacaaggttgatagtggcagatgtcactccttccaccgattctactttctggcggatatcttccataatgaaatcggctgccggacagttgggagcagtcagagtcatatcaagcgccacttcaccattgtctgagacatctatcttataaatcagtccaagatcgtatacattcaccggaatctcaggatcgtacaccgtctttagcatggctacgatcttttcttctattttaaatttttccatagggctttccttattaatatgtattgcaaagataagaataaatttattcagagcagcccttcgtcggcaaaactgtaaaacttatcctcacaaacaataacgtggtctatcaggcgaatgttcattgtgtcggctgcccggcggatgtgttccgtcaacgtccggtccggttggctgggttggatatttcccgaaggatggttatgcactacggctatttgcgtggctctttgcagcagtgcttcccgaagaatggtacgtacatccgtatacgttccgtctattccgcccgtgctgatacgtactttatcgatcagtcttgtcgcctgattcaataataatacccagaactcttcctgttcaaggtcgcacatgacaggctggaagatgtcgtagatatctcttgaacaagagatgcgggggcgttcttggatattttgcagtttccgtcgcttgccgagttccagagcagccattacagtgatgctctttgccggtcccattcctttaaaacgggaatagtcgcagacttcccactttgccaaagagttcagattgttatcacaagagagaagcaaacgcctcatcagttcgacagcactttcttccgtatttccggagcctattaatatggcgagtagttcggcatcactcaatgcggctgctcctttctccatcattttctcccggggacggtcttccagcgcccactggttaatggatagtttgtgtttgctttccatgatcaaatcacttacttataaaagttcttttgaaaagcttcgaattcatcctttcctcttacacagcgctgccaccatgcacgccagaatcccgttccataaccaattagttgtataaaggaagcagtaatcgacagcattccaatccataaactgcgatttctgattgtcgaatccacgcaaaccaccaaggaataaagcagtaagggaagaggtgctgccaacatggcggcaaatcctaaaaacagaagtgccatctcacctgtcgcacatccgggaaccgttttggaatatagcagataaaaagctaacagaacgagccccaaccccaaaagagtcagtaataaaagcaaagagactcccagtgtgaacactgccggtagccaatgcaccaatttcaacgaatcgggatatttcttataaaggttaatgcgggcaatgccggagttatggacttgcttaaagaacttcttcaagtctgtccgacgtttgtgatatacccacgcatcggggaaaagacgacaagtatagccacctttaaaaatacggatactgaagtcgatatcttccccgaagcgcattttagagaatccccccaaagcttcatacacttcgcgacgaatccccatattgaagctacgaggataaaacttatccatcttcttttttccgccacggataccgcctgttgtaaaaaaggaagtcatcgagtagttgatagctttctgaatatccgtaaaagaatcgtgcgcacggtcgggaccaccgaacgcgtcggcaggagaagactgaagctccttctctatcgcgtcaaaatatccttcgggcaaaatgacatcagagtccagtatgataaaatattctcctttgcttcgctccgctccgtagttacgggtctgccccggtccggaattgggtttagagaaatacttgatgtccaaccgatctgtataccgatctgccacttccttacaagggatggatgaaccatcttcaacaataactacttcaaaatctttaaaacactgtacagtgagactttgcagcaattcatccacctcatcgggacgattgtaaacgggaattatgacagaatagcgcatatcaatgaatttataaaataacgattttgcgtaaatccaataaaacgaatattgatttgaagcacaaagtaaggtaaaaaaaacgagacttataaaagagttaacaaaaaaaggcgacttcatgataagccgcctttttttattatctcagttcttcttactttttcagaatatccattgtatccgatgcaatcaacaactcttcatctgtcggaatcactactactttcactttagaatctgcagtagaaataatagcttcctcaccacgaacttttgcattcacattattgtccagtttaatacccatgaattccatgtctttacaaacagattcacggcattcaaactgattttcgcctacaccacctgtaaacaggatgatatctacaccgcccaatgccgcagcataagcaccgatatatttcttaatacggtagtagtacatcttttcagcaaggatggctctttcgtttccgttagcacaagcggccagcagttcgcgcatatcgcttgatacgccggaaatacccagtacgccgctcttcttgttcagcaggttagaaatgcctgtcgtattcaagccttctttttccatgataaatgttactgcaccggcatcaatgtcaccgctacgggtacccatcatcaaaccttccaacggagtcagtcccatggtagtatctatacatttgccatccttgatagcagcgatagaaccaccgttaccaatatggcaagtgatgattttttgtcctaccggattaacgccaaggaactcacatacacgttttgaaacataacggtgagaagttccgtggaagccataacgacgtacgccatatttctcatacatttcgtagggaatagcatacatataagcataatccggcatcgtctgatggaaagctgtatcaaatacgcctacctgcggaatgttgggaagaatagcagaaactgcattcacacctttcaagttggcaggattgtgaagcggagccaggtcgttgcaggcagcaaaagcttcgagtacttctttgttcagcaatacagattcactgaaacgttcgcctccgtgtaccatacggtgacctaccgcattgatttcgtccagtgatttgatagctccgtattccgggctaatcaatgtattcagaatgaactccacaccaatcgtatgttccggaatgtctttttcgagtactttcttttcgccattcggcaaagtcaatttaaggaaagagcctttcagaccgattttttcgataccaccttgtgcaatcacttctttggtggtcatatcgaacaatttatatttgatggatgaactgccacagttcaatactagaattttcatattgtctttaatacttaatacttgatacttatttattgttttttgctgcaatagcctgattagccgtaatagcaatcatacgatatacatcttcgatggagcaaccacgagacaagtcattcaccggacgggcgataccctgaaggatcgggccgatagcgtcggcatgacccagacgttgtaccagtttataagaaatatttcctacttccagactcggaacgatcagcacgttagcctctcccgctacgggtgaacccggagctttgcttgcacctacttcaggaacaagagcagcatcagcctgcatttctccgtccagatcaagtgtaggagccatttccttagcgatcttggtagcttccactactttatccactacttcatgtttagcggaacctttggtagagaagctcagcatagccactttcggattttcgataccggcaacggctttggcagtctgtgccgtacaaacagcaatctgtgccagttggttagggtccggaaccggagttacggcaacgtcacccatcaccagaataccgttcttaccatactcgggagcatgagtcaagagtaacatagcaccggatacacaagtgatgcccggagcagtcttgataatctgtaaagccggacgcagtacattgcctgttgtgttgcgggcacctgccaactgaccgtcagcatcaccgctcttaatcattaaacaaccataaaacaaaggatcattcgtcaattgacgggcttcttcgatagtcatgcctttcttcttgcgaagctcgcacagtaattgcgcatactcttcgtgtttcggagaagtttcaggatcgataatagtagctttgctgatgttacccagtccccatttcactgcgagttcgttaatttcagcgggtttacccagtaaaataaggtcagcaacttcatctgtcaaaatctgattggcagcttttaatgtgcgttcttcagttccttccggaagaacaatacgttggcggtctgctttcgcacgagccacgatttggttgattaaattaagcatagatatatttgaataatattataaaccttgttacgatttgtaatttgcgctgcaaaagtactcaattttgcaatatccacattacaattccggctaattttattctccaagtctaaaatattataatatttaacactgtacttctattttttctacctttgcagtgttttcaaacaaatcaataggtaattagtgtatgatacgtcagtgtgccattttatttggctgtttggctttgggtgaattaatcgtttatttaacagggatcaagctcccctccagcattatcggtatgctgctgctcaccctttttttgaaattaggctggatcaaactgcagtgggtgcagggattgtccgactttctggtagctaatctgggcttctttttcgttcctcccggagtagcattgatgttgtacttcgacgttatcgcggcagaattttggcctatcgtcatcgcaacaatcgttagcacgactctcgtgctggtcgtaacgggatgggtacaccagattgtccgcaaattcagactggcacgtcagatcaaactggcgagtagcctacgcttatcagactttcacttgtccgacaagctacatttaaaaaacaaaactaacttaatgaataaagacaaatgagctttttagaaaataatttctttctgctggctgtcactttcggcgttttcttctttgccaaattgcttcagaagaaaacggggctggtattgctgaatccgatcttactcaccattgccgtcctgattatcttccttaaaatggcaaatatctcttacgagacttacaatcagggagggcatctcatcgaattctggttacgcccggctgtggtagctttgggggtccctttatatcttcagttggaaatgattaagaaacaattgctgcctatcctcttgtctcaactggcagggtgcatcgtcggagtgatctctgtggtattaatcgccaagtttatgggagcttcacaagaagtcattctttcattggcacctaaatccgtaacgactccgattgccatggaagtgaccaaggctatcggaggtatcccgtcactgacggcagccgttgtagtagcggtaggtttactgggagccatctgcggatttaagacaatgaaaatcatgcacgtaggcagtccgatagcccaagggctttcgatgggaacagccgcccacgctgtcggcacttccaccgccatggacatcagcagcaaatacggggcgtatgccagcctgggattgacactgaatggaatattcaccgcattactgacaccgactatcctgcgattattaggtgttttgtaaaaacaaaattctttcattttccgttatataaagagttaaacgcaaaaagcattttatgattccatttaaagacattacactagctgatagagacacaataactgcattcaccatgaaaagtgaccgccgaaactgcgatctttcattttccaacctctgtagctggaggttcttgtacgatactcaatttgcagtcatcgacgattttctggtattcaaattttgggccggcgaacaactggcatatatgatgcctgtaggaaacggtgatctgaaagctgtattacggaaattaatcgaagatgcggataaggagaagcataatttctgcatgttgggagtctgcagcaatatgcgtgccgacctcgaagcgattttacccgaacggttcattttcacggaagaccgtgcctatgccgactatatatatttaaggagtgatctggctaccttgaaaggaaagaaatttcaggcaaagagaaatcacatcaaccggtttcgtaatacgtatcccgattacgaatattccccgattacgcccgaccgtattcaagaatgtctggatctggaggccgaatggtgcaaagtgaacaactgcgaccagcaggaaggaacgggaaatgaacgtcgtgccctcatttatgccttacataatttcgaagcactcggtctgaccggaggcattctccacgtcaacgggaaaattgtggcatttactttcgggatgcctatcaaccatgaaacattcggggtacatgtagaaaaagcagataccagcattgacggtgcttacgccatgattaattacgagtttgccaatcgcattcccgaacagtatatctatatcaaccgggaagaagatttaggtattgaaggcttacgcaaagcaaagctgtcttatcaaccggtaactatccttgaaaagtatatggcttgtctgaaagaccatcctatggatatggtcagatggtaataatatataaggtatgacgacaaaagaaaaggttaaggcattatggcagttatgtttcgacgacaatgaagagttcgttgaaatgtacttcaggctgcgctataaaaacgaaataaacattgctatcgaaagtggagatgagattgtttccgctcttcagatgattccttatccgatgactttctgcggagataccgtacagacctcttacatttcaggagcctgcactcatccggattttcgcggaaacggagtgatgcgcgaattactctcccaagcctttgcaaagatgcttcgtaacggaacgtatttcagtacattgattcctgccgaaccttggttattcgactattatacccggatgggatatgcttccgtattccaatattcggttaaagagattaccgtaccggaatttattccgtctaaagaaataacagtcacctctgaagtcggatgtcagaaagaagtttacgaatatctaaacagcaaactttccggacgcacttgctgcatccagcactcctttgaggattttcaagtagtcatggcggaccttattctcagtgacggaattttggttactgccagatcagagaatcaaatcaatggattggctattgtatacagaagagaaaagcaattaattatcagcgagctttttgcagagtccaaagatgccgagcacagtctgttgcactatatcaagcaatttacaggatgcaggcatatgactcagttgcttcctccggagaaagaacagacgcaatatccgttgggaatggcgcgaatcatcaatgccaaagaagtactgcaactgtatgcctccgcttttcctgaggacgaaatgcaactggaagtatcagataaacaattgtcagtaaataatggctattactatctgtgtaatggcaaatgtatgtatagcaccgagcgtttgcccggcgcacatatactaatgaatatcagtgagctgaccggaagaatatttcaggcattacaaccttatatgagtttaatgctgaataagtgattccagataacgtaccctttcacaagctgccagcaggaaagcaccgactccgaagtttgaagtagaattagcatccacgacttgccccggtatggctttctcgccgatgggttgcacataaccgatctttccgtcgggctgtaaagcaactgttgacaaatatttccatgccttctcaactacaggttgataatgggcggagtcaaggaaaccgttattgatcccccattgcaaaccgtacgtaaagaatgccgtaccacttgtttcgggtcccggtgcatgctgcgcatcgagcatactacgcgtccaatacccttcaggttgctgacaagccgcaacagattttgccaatgtacggaaacggtctatatattcctgacgatacttatctgttcccggaaggtctttcaagactttcgccagccctgccagcacccagccatcaccacgtgcccagaagtcctttttaccattcacacttttgtgcttgggatatacgtattttccatcgcgatagtaaagtccggcttcttcatcatacatgatactgtctgcataagcaaggtattcatgcagtttctccaggtaaagtggatttttagtgatattatatagtttggtcatcacaggcattaccatatataaaccatccgcccaccaccaataatcattgttgggtgtactcatctgatactccatcacctcacgggcacgggctatcttatgcgtatccggttccagattatataaatcggcatacgtctgaaaacagatctgataatcgccgaacagtacataatcattgctttcgccataactgtacttccagttggctttattatctgatttagcgcctttccactcattatgttccgcccatccttttgagtattccaggtattccggcttgttggtcaggaagtaagcctccatgtttccggtatgataagcggcattgtcccagaaagaacgcccgtgttccggatggtttgtctgccagtagccattgactttatgaataatgtcaaccacttctgccgaagatgaaactttcttggttgtgcaaccggcacacaccgcacagcctaccaccagtgcggaaaaaagagttgcatacaatttcttcatatctttatttttttgtatttgtattcgcttccagtacatatatcatttgaggttcaatctccgccgtgcgttcaccgtcgccttgacaagtgtgctgtacaaagagattgagtttccgctgcttcttccacaattccgtgtcatgggacggttcccaggcatctacggaaaaatccgtcaggtcggtgactatccacttaccgttggcaacatcagcagtatgtgccattgaaacacggctgccccgctcttcgtcacggaaaatatagaagatttctccatcctctaccacaatacgcggacgggcaacaggaatcatcttagtgcctcctcccttcagtgtaaacggagtcttgcggtctgtcacctgacgattatgccatgtcttcccgtcattccagacaatgcgatattgagggacttcactgtccgaactcctccaataagtggcaatataaggattgccaccagcgtctgcactcatacttgtctggtttatcaattccgagttttgtggaatacgacaagcatactctgcattcgaagctgtaatcggaagtttatattgttcaccatccgacttataccaagtcactccgttatcaaaagaacgtgcgtagcaaaggtcatggttggtctccacctgccaggtttcgcgccatacccacgagagatgaatcgtacctttttcgtctacatatagctgccagtaagcatttcgtttgtcttcaccatcaatcaggacatcctgtacacgggcccatttatagtctttcaatgaataacggttcatcaccagatttccgcgtccggaagaaccggaacggtagacaaacaacaaatccccgtctgtcagagggtaaaattccggataagtaacatttccttcgtccactccggtcatcggcattttatcgcccagttccaaagaaccgggggcgatactgcggcagtaattcaacttatgtccatggtggtcaaaagaaacgtgcagatacccttctccgtccaccattatactgatgatattgtgggcatcttttacatttccacgatattgagtacgatgcaatgtccattgcttcgaatttagtttccgtttgcccaacacaagatagccgtcggcatcataatagctgatatattgctcatccccatgcgttaccaatgaattattgcggaatatcgttgtattgacagatgtacaactatatcctttggcaacttccaccagtttttgcgaaaagcacaaggcagaaacagatagtagtaaaaaagtaagcagcagtatccgtttcatgatctattttttctgtttgtcagatttcttgtatttgtcagatttcttctgtttgtcaaagacggtcaaatcccacttttcatgccatgggatggtaatagctccgtcttttatcaatacaggaagccatacatagcgtgaatcttcgaggtctttctttttccagcggtcaaacatggcaatatatgcattcttctttccgataaccggttgtacgtatgtactctgcgcatagaaagtcttgtctgcatccggacctgtacaaggattacctatcgttttccatgtacccatgatggaatccgccactgcgatttccgccacattcgggtcccagccggtgcagccggaacttaacatataatatttgcccttatgcttaaacactgccggagcttcacgggattctttgatgaaattgcgtgtaaagcgtccgcttggtttcaggtaatcgtctgtcaggagactgatatacatggtttcgttattttctgaagaatagaattgataggcacgtccgtcatcatcgacaaaaactgtctggtcacggctcatcgcattattcggtcggaaacttcccaagtaagtgaatggtccgtttggaaaatcagagacagctacacccgcacacgctttgctgtaatcggcactctctacatgtgcccacatcacgaacttacctgtctttttattataaatcactttcggacgttccaaaaccttcgacggatgcaggtcatggttcgggtcctctttgactgccggaagcacaatgccctcaaacttccagttcagtaaatctttggaagaatagcagcctactcccgtcacatctgtacgataacactcccatgtagcccaatcaggcaaaatcgttttgccctttttatattctccataccagtagtaagtaccgtcgtggtaaagaagtcccccgccatgcgcattgatagggttaccgtccgtatccttccacacttccccgggaataatataactattcttctgagctcgcatttgtattggcagtaaccctatacaaaccactaccagtaataacattcttaccatatatatttcattatttttgatgtttctcattgttctctgccgacatatcacctcgcagtgaaatcattcgctcacaaagataacctataccataaagaaaagagttcaaatatccgtcaaaaaagggatataaaaagaccattcttcgcaaaatgtataatcttccggaattttcccctttctcatagagaatatttattgctgaaagcaataaagatgaaaagtatatccgccggcttctatatatacgatattaatcaaaattccacctatccatccattttataaaggggactcctttatcatcaaactgaacaggcagccagatgtagcgtgaatccgccaggctcttcggacgccacatatccgccataaagacaaattgccctttctccggcaaaggcaatatataagtactttgtcctccaaatgtcttatccgcatcttcaccaacacaagggttcggcagttgcttccattcgcccaacatagaatcagcggttagcaaacgggctttattaggatcccatcccgtgcagccggaagttatcatccaataagttccctctttcttgaatatagcaggagcctcattgtgtccaccagggaaaatacggatatattttcctgtatgactgagataatcatcggccagttctgcaatctgcaatgtcaggttatcttctgaggaatagatatgataagcctttccgtcatcgtccacaaataaagtcatatcacgggacatttgtccgtctttcagatcacgctttacgaacataccttttgcaatagcttcataccacttcggtgtccaccattccttatactcttccggattccacttcattttccgttcttttcgggtcatgttcaaggggtaagctcccggattgaccctgccggagcgaatgaaacgatagggaccggcaggagaatcactcactgcaacggctgcacgcgcaggtccataaccttgtcctttcagttctaaatgaagccacatgacaaatttcccggttttcgcattatagatcaccttggggcgttccatgatgcatcctttctcaatgtcatgcccttcttcctcagagacagctaaggcaataccttcagatttccagttatacaggtctgttgatgaataacagttaattcccttctctgtgacaaaaccggatgcaggacggtgttctccaaaccaataatattttccttcatggaaaagtattccgccaccgtgcgcattgattacattgccatccgtatctctccagacctttccggaagcgattcccttttctttctgatagactcttacataatctatttcatacttcatcggcagggcggcctcatcaatcgggccaccgttaattccgccaatggcaagattcagtaacaggtattgtggttttgtaaaaggattggtacctttaccgatacttccattccttgtgctgctcagaggaatttcattcagcagttcatcgtccaaatatagtttgatagcctcttcatcccagtccatgcgccagatatggaacttagatgcccaatcgggatctttgtcagtgaaatgcgaataaggagtagcctgactgtcccattttgcatgccaaggtttgtctgttccccaagcagcattggctaagatatgcggtattcctttaatctgataatattccatgatatctatctcaccacatgaaggccattccatattacttcccaatgtccagatagcaggccatgctccttttgccacgggaatacgtgcctttatctcaaaacgcccatacagaaactctttctttccggcagtagtcactgaagaagacgtataatcaataaattctctcttcttccgccaatcattacttccggatacataaagaggatttttacggttctgctctttccgggcttctattatcaacagcccattcttgcaaactgcattgtcggattggtaccattgaacttcttcattacgcgcatatccttgctcaaagttccatacagaagagttcaaagaaccatctgtatcaaattcatcactccaaacaagttgccagtcgtcctgggcaaatatgcatagtgaaaatgacaagcccatcattaaatttacaatcttctttatcttcatactaatttgtttttctttggtatatccaaacctattgaactatttatccctaataaataaaatgattcatatttacatcagcaaaaataagacttcaataaaaaataaaggactagaaatcgtgcaattaggtcgaactttagatcatattcattgaaatgactcaataatgagcatctttgcacgattttatactgaacagtaacatataagaagtcatataatcaaacgcaggagacaagttcaatcatctcatcccctgcatttactacctatataaattgattacttcgtcattgtaccccttaggcgatacctctttccaccagactcgtaatcgtaacaaaatgtaaatgtgccatcctcaaaactaacggtcccgttagaaaccggaagattcttccagccagccactgtgaaagtaccgtccggttgacgtgtaaacgtcacaccgttgttatcaattgagttgaaataatcttcagttgtaatgtttccagttggtgaaagatctgaattctgcgtaacattaaagaaacgagcctgatttttattcactgccttcaacgtacgctgcatattaacggaagaaggagtcagttcttcatcattgtcagtcaacgtatatctgatggctaccatctgataaatccctgaaaagtcattcgttaaattgagattcattatgagaactgtatccttaggctgtttcacgtaatcagatactgactcaattttgaaagtcaacgcataaagtttatcacaatccaatccggaagtttcgacagtaaatggcaaccgactatatacatcgcccgctttaatggtcgtgctcattgacggaaaactgcaaaattgatcacccaacttctgatattttaatggggcatccaacatatacttattattgtaccattcgatggtagcgtcattgtgagtcaagacgacttccacattccggtcgatattctggctacctcccgtagcaacggcaacatacgcattttgcggaccatcgccatacgccacatcaaattgctgtaccacttcataggcacccacaatataaacttgtttgtagtattgttcaccatccaaagggctctctttactacaggatgcaaataatcctacaagtagccccaacgtataaatagttctaattagtttcatatttcttttgattatataggtttatctccattccggattttgcacgaggttcttgtttttatccaacacactcttaggtataggatagaaatagtgtttgtacgagaatgaacgccgtgtcaatttatcgttcaaaatagttgttgtgtagaatttctgacgttcattgcttcttgctttgacgttgcaaccggagataggacgattgtatgcctccatagcatctccccaacggcgcaagtcgtgataacgacgtccttcgcaagcaaactctattctgcgttcatgcttaatcagttcacggaccttattcctgtcggcagcaacagcctcagtaattccgggcagaccggcacgatgacgaatcagattgaaatatttcacaatatcagctgtattatgttccaccgtcacttgactgccgttaggcatctccagcgtatatggctctctcagctcattaatagcctctacataattcagcaatgtttccgcataccggaaaaccgggaaatatttagctttgaccgtaccctttttcatctcatcttccaaatgtctatatttgacacaagtatagcctgtacgattataatcttcaggatgatccggattagcggaagcatatccgtcggaataataagtaacctcaatattcttgtactgattctccgaagaagaagtgcctggccagaatgaatggcaaaagcctattgttgcataaaaacgaggttcgcgattgttatacattctagcagtgctcgctagaagtgtaaagccagagaaagtttggttggcaccgccaattctttcaaaattaacgctggcatccggataaggatagtcctgactggattcattgatatcttgtccgtctaccatttggtaagcatcaatcaagtcctgtacaagattcaagccaccccatccacctaatttgaagggtgcagcagccaccaatggggcatcacttgtcggcatttgacaggaatagataaattctggattaatcatcacaggaatttcaccactgaatgtataagtcaacgaacggtaatggtcgataccggctgctccctttggataaggctcataataatccggatctatctctttgataaattcttcattagtgggtagatccttgctatctatttctttgggagtccaatacaactcaaatttatttgaatcaataatgtattttgaataagcggcagacactccccatttcgaattatcattttcctgcgaaataaagtttgcgccgtcactcgtccgttgccagtcagcataaaacttattgccgttataccacggactggctgcatacaatgtaattctcgacaaagtagcgtaagcagcccattgggtaggaagcgtcacaaccgttgaactttctacttccagtggcaagaactgaatggccaaagacatccatttacggatttccaatacgcattcatcatatgttccccgttccagtgacatttcggctaccggcacatccacattaaagggcgtttccggaacaatgggcacaggtccgtactgcaacatcagcagataataataatatcctaccaagaaatagcatcgtcccatcaattcacgacgttcaacatctgtcacatcgggtacctcatttattctcgacaaagcagttagtgccatacgaataccctgataatactttggatagttattgtaatatccgtcataaggagtaatctcgtccagcaaaaacttcatgccgtagtgctggctatcattccaggacatgaaattctcatcagaagcaatctggaacggtgtagaagaatttgaccaaagtttgccttcattgggtatatattgtgccgcaccgttaatatactgatctaagagttctttgcgagagaatacggaatcaagaaaagtcatctggtcaatatattcttcgacatccagataatcaccgcaagattgcagtccgatggttatactacaaaccatcgacagaaataaagtctttataatatttgttttctttttcataatgatcgtcctttagaaagttaagttcaactgtaaggtgtacatcctttgcaaaggatattccgctccattaccagaggcttgcgatggatcaaaaagcttcactttatcccacacatgtagattctcgcctatcagactgagagtagcagattccacaccgacacgactcttcaaccaattattcgtaaagcggtaagagatatctacatttttgaggcgtagatatttaccgtcagctaaccagaaggtagactcctgattattatttttattttctccatacgttagtcgcggaaacttagcattcggattctctgccaatgcaggatcaatgccattagcctcagcatattctcttggaatccaacgatttcttggatcagcaaccatttcaagtaagttgcctcttgattcatttaagaaaggatagaatccccgaccaccttgaaaatattgtactttagaaactccttcaaacaaaatactaacacggaatgccttgtagttccaatcaagtgcaaaaccgtattgtataaacggtacagcagagtagttgagaggtacgacgtcatctttatcaatcttaccgtcaccgttcacatccttatacttgatatcgcccggacgataattatccataaaggtctgtttgggactacttttaatgtcatcctcatctttaaataatcccaaagcaattaatccgcgctgtactttgtaagggactccggaattagactgatacggataattcaccccactctgttcccagtagatcacttcgttttcagcgtgagtaaagttgccacgtacagtaagagccatatccttattaaatgtatgagtataagctagtgtaccatccataccccacgacttcatgcttccgatattagcataaggaagtacattgcttaaaccaccctcgtccggtatattggcacgcctctggaaaatatcggttgtcttcgtatgaaagaaatccactgtcatgtctaccttatcatcaaagaaacgggcatcgataccaaagttcgtttttgtactgacttcccattttaaattcattgatccggtacgattttcggcaagtccggttccccatgtactggaaacgttacctaaagtagttaaataagggaatcgaatatcattaccattctcatctttcagacgatcatttcctacccgtccccaagaagcacggaacttcaggaagttattgaatgggagcaggtttctataccaatcatattgcgtaggcacccaccccccggagatagaggggaaccaaccgtagcgacgttctttattgaaattttccgaaccggtatagccaagattaccttctacgagataggtatctttataagaataggtagcgcggaaggaaagtgcctgataacgtttgggaatgctgaccagcacaccgtttccccaatccacattggtcagttcctggcggtaaaaatgcgccaaccccgtcacacggtgatcttgattaaacaaacgtttatagttggcggcagcttcgaaatataattcccgattggatgctgatgcttgtattgctgtcatatcctccttatttacagtacgcacagttttcaagctaccatccaaataacgtccatctttgggatcggcataatattgttcggggttcatgtgtctgtcgactatgtgtgcaccattcatggagaatgagaacaagccacgtactgacaatccctctgtgattatacccaaatcctgcgacaagcctacatttattttggtagaatacgtctcattggtagtatatcccatgtaattcaggcgtacatacggtgatttatcctccagattagtgccataagcaggcaactgaccattagagtacctcactggaaccacagtaggaggtaagttcgcttgcgattcccacaggtatttattgcttgagcctgttcctggtgcgttttgtgtcttgattactgcttccaaattcaaactcaacaaagttgtttttgtaaggtcagcatcaatattcgtacggaaattatatttatgatagtttacattaacgtcatgtttgcttgcagacttatcctgtttaaatagagcttcagagttaaggatacccaaactcatatagtagcgagcactttgtccaccaccggaaatacttaaatggtgttgattgttaattacatgatctttcaaaatcacatcacgccaattcacattcggatataaatccgggtcaagacctgttttgaataattctagttcagtagcagaatataccgggtcgtctccacgaacagagcgcgcttcattcgccaatgttgcatattgataagcatcggcatattccggcatacggggtgaataagaataagtagcattagttttgaaattgacatgcaactttccggcttttcctcgcttcgtagtaactacaactacaccattggcaccgcgagttccataaacggctgttgccgatgcatctttcagaatactaaaactttcgatatcagcaggatcaagatcgttgatatttccttcgattccgtctatcaacaccaatgcactagaactggcgccaaacgtactcataccacgaatccagaactccgagaagttgttaccaggttcgccacttcgggtcacggcaataatgcccggcacgcgtccacccaacatgttactcaccgataccgcaggagcttgaatccctgccgggtctacattggtgatagcgcctactacagaaacctttctctgagtatcacgccccactaccacaacctcatcaaactcattgatcgcctccttcaaagcaatcttctctttcagtttcgtagcagtatatttaatttcccgagtttcataacctatataagaaaatacgagtgtacttccggcaggaacacctgtcatcttaaaccgtccgtcaaaatcggtaacaactcctacaccctgttttccttttatctgaacagacactccgatgagttcctgtccttgctcgtccaagacgatacccgcaacatctattccgccttgggcgaacatagttgctgacatgaatacccaaaatagtactaaaatacttcgtttcatatttatgtttttcttagtgattattctactgcatacttcctaatagcttttccccaggcttcagctatccaatagccaccttcaccatcgtaacaaatatcataaggatagttaaaggtagcttccagcggtgtgccatctatctgacttgctacatctacctgaccagctacagtagatacatagccatcaagaatatccaacttgcgcaagcagtaccccttaaatccatcaacaatataaaagtttccatcttcgtccactgtcattccgttgggttgggcaaacaaagcttcttcccgaagaccatcttgcactgtcttttgggtagccgacccacagaaccattcacattctccatcaggagtaatcttgtaaactgaagacagattctggtcagacatgtagaaattgctatctacaaaataataaataagataagggccaggatttgtgccaagagatcctgagagttccagttgctttattaatgttacctcttgtgtcttcacattgaagcgaccgaaattcttattagaatcaacaaaatagagccattcttctgtctcatccaatgcaacagcaccaattttaccactaaaagtagaaccaagctgtccgatacgtgtaggtgcccaaccacttgctttcatatagacatatactgtatgagtcccttcccaaccaatactatacactctttgtttgtctttggtaacagcaggctttccacctttaaaacccggatgaacggtagtcaccttgttatcatccaccgaaatcaaacggacacgaggatcatctctttgataagcaagtaccgtattatttcctacggctgcaattccccacatgtacttgaactttgcagatgcaaggtcaccatcatcattcccatcttttgaagccgaaccagagatggtagaaacattctgggcctgttcatacttaaatgtgccatctgtagtcacttccttcccatcaacaattaccttgatacggtttccacccggcaattgtctgggtgcaagacaataaagggtattgttatcgatacctattactgtagataagcgttctgctgcctcgtccacaaaataaactttcacctttgatttgtctgtaccaaagttagaacctttaacgataaccttttcccgtagcttgccctctaccggcataaagctctccactgtaacgggctgattcggatcataagtcgccccagtggttttgttgtcatcgctatctttacagcttcctatcaaaaagagaagtgttagcactaaagaatagaaaatgcaatttttcatagcaaaaatattaatgaattaataaataatgattagtctcaagattacgtccgaacagtatgacatttaagactccatactttgagctagttgttttctttgttaatgtttcatttttcatcatattagtatatatttagaattgtcaattgtttcaccgacttatcagcctagatgtcaacgaatgcaaacatagaccattctaatgtcaacaaagagtaataatcatctttatagggagaattatagtgattaacttattttcctcctttatgaatgataattctccctataaaatgctgtatttaactcttttctatgtggttatgaatctgcgacccaattattacaatcattgcagtcaaatacaataatccctttctctataaaaaataagacctgcgaatgcatgaattaattcgtccgcctatgggcaacgtttcgtccggctataggcaaacgcaatgtcgtctataggcaaacttgcgtccgactataggcagacgaattaatttatgtactgaaagggattattgatagcacaaaccggagctaaatttagcattgaaattctttatccaataaacgacttttagatttatatgatttgaatttatatatgaacggtctggctcatttttacaccaaattgaattatatctcatcctataattttcaataaatgatccgtcgcattaaataaagtactatttttggaaatcatgtctttcaactttgacaggtgatatagaggcattttataagcgaattattaatcatatattcaactttaaattagaaaattatggaaaaacagattttgaatttcgttttcatttcagtatgctcatttctgttattcattagttgcagtagtgaagacagtataaatgattctcattacactcaacaatgtaatgtgacaactcgatattcatctgtcggatggggcattgctagatgtacaataaaaggaagaacagtttttatagagtggaatttcccaactgcatcagaaaaaccagttggtatgttgttcacgttacgctcaaacttctatgggtatatagattcatttgaaactttcgaagaagaaatggtcggaacaagaagctttgaactccctacttccttcacattcattcaaggtgatacactttggctagaaataaaggatgggggaggattgcccgttactttacaattgacatctattgacatagatgaatatagcggtcaaagtagtagcgaacctaaatgtgatcacaattttgattttagagacacaagcatcacagtaggattagatctaagtactggcaaaatcgaagggtctattggttatactaaacgatgtagacttataatggtttacagctattatgatttaatgcacaagaaaacaatccgtggatattgctgtcaagatatagtcaatggcatcgtgaatacaaattggaatgatggtccctatattcatagttattattatatgtccaatgtagaatgtgaacttcgaatatatagtttatcttgtgacaaaaggattcctgattcagatacaagctttaacaacagcggaaactgtaccaattatttaagaacaacattctctttttctggaaatactcctctatattctctttctgaatatatggcaattgtcaaataacaacaagcattagagtttattgaaaatatttttacattcatgcgtatacatatataaaaatacacacatattaactctgctttatttttgaaagatgggaaattctctaattaccataaattctgaaaatatcccatctttctatcatctttattaagaagaatcgttttaaagcaaaattctttactcttattttttttcttctcgagtaaaccgtactatatagacagataataatctgttgacaagatcaattcatatctgatgcgaatagctcagaccctgttcgaaaaaggcacaaaagctctacctttccaagaaaaggtgaacaccttgcattcagccttttcagcttcgctcgcaaacgccttgccagaagtggatatcggctgaaggcactcttctgtgccccactactaagatgttccaggagagggtaggtgctttcagccctttcagcctgaaaaataattcgttcgaacgccagtagtttctcacaaaacagaggctgtattttcgtataacagaggctctattcagtacaaacagagggtctgtccgacgcaaacagaccctctgtttgtttctggactattagtctgtttactaatttaaataagccgatattccaccaaccttcatctcggggctgagtgacattcacctcggtggcgaatgaaattcagcctcgagcttacggaattcagcccacgtggtgagtaactataacttgtaatcccaaaactgaaagggctgaaagcacttatcccctcccaaaacatcccagagacggggtataaaaaagcgccttcagccgatatccacttctggcaaggcatttgcgagcgaagctgaaaaggctgaatgctagatataatccaatagtagtacggaggaaagtcagcacatcattcattggatagttgtacatcttcgactcaaatgttgtacaagaatcaagcaactcaagtacttacaaccattaagtcctatacttattggggagtactcttttagatgtctgattcatttcttatacaagaagttcattcataaccaaagcagaaatgcattaaatgtatttttgtcattcagacgaccaacgagagaaagaatctcattttttgtgtacaggaaaaaagattcttcgtcgttatactcctctgaatgacagaggctattatgaaccagactttatctacttctctacatcttgaataaaccgttcaatataatcagtcggcagcatcccgaactctttcttaaaacatacactgaaatacttcggatcattaaaaccaactatatatgccaattctgaaacacgaatattatttcccttttcttccatgatccggcaggcagctttcaaacgcacattgcgaataaaagcagaagtattcaaacctgccaaggatttcaatttcttatatagagtcgatttactggtaatcatttcttcggcaaattgtgtctggtcaaatgcagcgtctgccaaatgattattcacacattcaatggcacgctttataaagtcttcatccagacttgtataattcaaatcctttacctcaaacaccaattgattcttgaagtcgcgtgtcgtgcgttccttatacttcagcaggttacggatacgagcatgtaacaccgtcaggttaaaaggcttgctaataaaagcctccgcaccagcttcatacgcttctgcacggtcttcttccttattcttggcagtcaatagaatcaccggaatatggctgatttccaaatgaccttttacgtacttacagaattcgatgccattcatttcgggcatcatcacatccgatacaatcaggtcaatatcctcattctccaataccgtaattccctctttcccattttcggcagtaaagacgttgtaatcacggttcagaagtttagtcatcaattgcagcaactcctcattgtcttcgaccagtaagatagaattggctttctccgtcacttcttctacttcattggtagcttccacttgcgtgacttcataagtcaccgtcttctgtatcggcaagattgcttcattatctatttgttcttcttcataataagaacggtcaataggaatcctcacgatgaactctgttccctgatcgacttcactctctactgaaatggttcctccgtgcaactccaccaaatcttttgtcagggaaagtccgataccggtgccgatagtattgaactttcgataatctccttcgtaaaagcgtttgaacagcattttctgtttctcttttgaaatgcctttcccgttatccttcactttcaagagcacaaaatctttatttttatcataagacaaagttacttggataaatccgccttccttattgtatttagcagcgttagacaacagattatataatatcttatccaatttatctgtatcgaaatagccgataatagcttccgggtcgcaaagtacagagaaatgtatctttcgtttcttcaccagcggttgaaaactttcagtctctcttttcacaaaatccgcaatatctcccggagaaacacacaatttaagatttccggtctctgctttacggaattcaagaatctgctgtaacaatcgtattaatcgctgtatattgctattcatcaccgtatataaatcattatgactaggtgcctgtgtcttcaattcatccaccgtagccgaaataatagtcaacggagttaacaactcatgcgtaatattagtaaagaactgcaatttcgcatgattcaattcttctgcttttgctttttctatttcacgcaggcgcaatgcattccgaagcaacatacggttctttgttgtacggtaaatcaaaattcctacgaccaacacccatattatatataacagatatgcccaccaggtagcccagaacggaggaaggactaccactgtcaattcacgcacatagccactccattctccgttctcattggttgctttcaactgaaaagtatatgtcccgctcggcagattgttataataagcaaagcgacggtctgcatccgtatactgccagtcccgatcaaagttctgtagccggtaagcatatctgtttagttcgggattcttataggtaagggcggcaaattcaatactaaaattattgtatttatgaggaagttcaatcttactggtataggtaggcattaccggtgaaatcttttgttgcagttcgaccggcaatttactgaaagaatgattgaatattttaatatctgttatcaggaaattggtttcctgagaaggtatttccattttatcaggaaaaaaactgttgtagcccttatgtcctccaaaaaacagttctccatttcgactacacgatgaattgactataaaattatcctgcaacccatcggcagaagtatagatatgggtcgagaaatcatttccaacagcagctacataaagtttcactagtccggaaatcgttcccagccataaattaccacttttatcttcttctatgctaacgataacgtctcccggaatactatatgcacgcgttttttcctcaaattctcctttgttacgattataaaggtataatcctcctccctcagtccctgcccacaatcgaccaaaacgatcaagatgtatacacaagactgtattcgtgattagtttacgattatgaaaactataattctcatatttcaatgtggaaggttgacggacatcccccgttatatgaatcacacccaaattagaagttgccagccagacactgttatccatatcctttatgatatctcttacatatatccagcctgccgacaaactatcattaaagttcatcgtttcaaagcgatagtctgtaccgtcagccaatctgacccctattcctcctcgcgtgccaacccagcaattcccttcataatcttcatataaagccgacacacaatcagaagtaaggaaaccgctattctttgtagtcaagtgttttaccttttcacctttccgatatacgtagattcctccattatacataccaaaccagatttcaccactcttcttacgctgggtaactgcgaaaagggatggcaaatcttttaaccccgaaaattccggtatgtgcgaatacatctttagctttcctgtttcatactctctacaggctagtccgtaagttcctactccaatccataggttttgatctgaatcagcaaataaggtacgaacggaagttaccggaatatcttcatctccaaagttaagtgtatataaagcaaatgtagattgacgtgtatcagccatcagaactcctcccccaatagcccctatccacatattcctctgagcatcacgcataatcgagttaacctcgtcagaaggaatacgataatctgtttttcccgatttataattaataaatgcgtccggttcatcaagttttaagatactcaacccactacgtgtaccaacccacagggtgtgagtattgatatcttctgctatatcatatactatattatcagacaaactggaatcatcaccgttctcatgcagaaaacgctgataagacacacgttgcatatctttaggattctgcaatttaaaaagaccatatccccaactccctacccaaatatctttattactatcttcataaattacatgagaagaatattggtcattgattttcggatatatttccactttatctgtgaatggagaataacgaaataagccttgtgcccaagttccaatccagagatcgccatctgaatcttctaataatgattttatggtaacataccgcagtctactatctccaaagtcatctccacaaactacaaaagtatctttctctgcaacataacgacataaaccgttatccgtccccacccaaactgtattatcacgagtcacacacagagcagacactacattgttagaaagatatggtgctttatacttttttatttctccggttcttttatccatcacgttcagtccttccgatgtaccaatccaaagattattattattatcatcaaccaaacaagtgatgctattggtagtcaataaatccggagagtaaagattggatttataaagagtggtctcatagccattatactggcaaagtccattacgagtagcgaaccagataaatccatctttatcttgatacactttttgtacttcatttgtcggcaagaaatatggagcagaaagttgcttaaatttgaggttgtagatgacatcctctgtcgccaataacaaagcagacttcaaaagcaaaaacaaaatcaaaaaactcagcttataataaaggataacgattcgcgtgtttttcatatgatcatattttgttcgttaaatacaaatataatacttcacaactgtatatacgaccaaaattatgaataaaaaatttaataaacaacgattagacagttctagctttacagatatactgataagtagaactttttgaagggaaattcaccatataggcatttaagactcatcactatacataaaaaaatacagtggaaaaacacttccactgtacatttctcatattttaaaattactcaaatagaatcgtttttatctctttcgtatccagacgcactgtcacttgtttcttatcttccgaaatttctatcgaccggaccggattcaactctttctttgtaaagccattcttagcttcattcttcttccaaagttgaagtgtcatataaatcttgctaccagccaatttatcagaagccataatcaaagcacactcatcactgacaggatgtaaccctttcggatacgatgtatatagtttatcccatccagccaatggtatcatagccagttcatactctccgttatcaataaccggaatatccagcttgccgacccttcgggatgtttctttaaatacaccattcaaacgaggcagtgaataatgtcccaaacagatttccgtcggttcggagaccgaaactttatccactctcaagattccgttcggtagcggaatatcggccagttgatatcttactgtactgtctgtttcaagtacggcatcacggcgatagataccgtctttaaaactttggaacgtataaagccgtaatacttcccactcgcctttctgattctttgttccgtaattcatggatatttctccgttcttaccatccgccatccacgggaattccgtgttgtaagccaatttgttataattctccgtactacgaaacttctgccagtcctttgcaacagtttcatggcaccatgagcgcatctcagcgcctccgctattcggataattcgtaatcaacaggttggttcccggttgaaacttattatatacattcccttttttcagttctttatcccaagggccattattttcggcagcagaccagaagccagagttttccggcaacagcaaactcaaaaaagctttgccgcaccagtatacactaccccgacaactataaatctgcacagcgggagcaaacgggccataaaatcccatcgttggaaccccttcctccaagaatttcggattttccagaaattgcagcaaggtagaagaagcaatcctccttatccagccataatttacatcgctacttttatcatattcccacagagacaacggagcagtcgctgcaaaacgatagcagatgcttcgtccccacatattcatcttaccatcccggctaaacatatatggatagttagctaccatatcatgctggtttgccaggaactgctgtgccaactggggaaattgcttctttccaaacatttccgcccaaatggggccatatgtctgataagcccacgcactgtaataatcataagccggagcatcattataccagccttccccccgataacgtgccagcagtttctttaaattcgactccagatagctctcattcactgcatagccctgatctttcagaaaacttaaaataaagacgttaaagaacatccagttagaaccgatggtcggtccttctccgtagctcagcatggttgcagcaagcgaatccttttgcgcttttgtcagcgggtcccacaaaacagcctgagccgctttcattgaaatggccaaagaacctaactccagtaacgtctggctaggtcctcctttacggtgaggaataaaactcggacttttcggattagagataccgactaattggtgccgatagtaatctgctactcttattccattcattaccagttccggattatctttcaacaggggtgctgcaataaataaggttcgtgccagcccctccagcttagcaaccggaacttgtccgtcattattgggatatgttttgtccagttgcttcggaaagtacatctgatcatccaacgtatgaatataaccgaatgctcctttcagcagatactctcccgcctgtatccagtgttgacgtgtcattcccgtataaggactcttttgaaagtcaggctgctgtacagtaaacacactctcctgagcaatggcgactgacagttctgccaacgggagaacaaataataaaagaactcctatcacaaaatctcttaaaactttccttctcattgtatttctattttttgatccagcaatccgttaatatacacacataatactcccttcttatactctagctctaacttgaaactcccgtacttttgtggagtgtaccactcaccgcctgtattgcgcgaagttgttttccagcaatcagatgttccaagtatatttgtgctaggatatacctttccgttatatctaacttccggtttcatggtttgtccgttcagataatattgaagatcgcccaattgtaaaaggcacccttgataattgtccgcatccagagtgaccgtttgttccaatacaaaagccaccttcgggttgaacttaaaatccttctccgttacaacattcttctttttcttcgcacccgggaaacctttaaaatcacaggcaatccctgtgcaataaccttccggataccgtgaactgacaatccaatcgtaataattgccatacatccatgtgagccgcaaaggcgtattttttgaatcaggtattatataaggacggacattattctgctgcgagtcttgcgtaaccgcttctgtagagaccacctccccggcctcgttcaagataaatttcacgatctcgtaaaccttcccttgctttccttccacaggcaacgagcaataaacatgattcgcattcgacggatctatagtcataccggcactgtaacatttctccaagtttggtgtctggtgaaaatgcccaccggcgttgccaaggaatgtcttcttccattcgtgtccgttccacttcgcataatagtaatcatgggaattcttatcactgctgattcgcaccattgcaatgaccggattatcattctcatccaaagcaacctgccatacccaatcacgtgcggatggattatctaccagagtagatggatactgacgcacatagtcacccgtcttattcactttaaaagtaccgtcagcaatagtcgaaagagtattcccctttacatccttcaactgcaaagaatgaacatctatataattaaagtacaaaaaattaggattctcattatccggatgaccggtcgtataagcaaaataaattttatctttcccattcgacatatacttggcataaggacgggccccggtagactgtactatctgatacggtccccattccaccgccacctgatcattctgatcgggcaacgacagcttggcgatagtagggtgccagccaatcccccgccaacatagatagatatgttccggatcatccgataaaataaacggggacggataggtggtattgtcctttgttttaatcaccttttcctctcccaatgtcgtaatatctccgggaatgcgggaaatacgatagtagaaacaaggctcatccgtgtgacgggaataaaagatcataatccgttcatccggcaataccaaaaacgtcggattattgtgatcatccggctgaaaataagaacggatcagtacctcgtcctgtcttttctttttaaagtcatactgcatcgctttaatattgccgtgtatatcaatatagccgatatatgtcttgtttattgtacctttttcattctcataatgcaatgcgcgcggatcagcaaaccaacaccaagctccttcggaagttacttcatacacttgagaagatgctacatttttatcactgccgggatttacagtgtcaacttcgtgtccctgcaccgacagcaaatgacagaacaaatataaaatcagaaaaggtaaaatcagctttgctctcatggtaaccaactattttttagattcagcgcaaaaataatgctttagatacaaaaggacatccgaataccgttcattaaagtccaaatttagatcatcttctctattatgaatgataattaccctcctttgacagatatgtaacctttttatttaggtggatcccctatctttgtcgtacttataatataacaaaaatctaactgtaaatatcatgaagcatttatttaccaaaatctttctattccacttattactcatcggagcagtacaagtaacggcacagaataagaaatccggtaaccctattctaccggggttccatgccgaccccgaagttctgtattctcatcagacaaaacgctattatatttaccccaccagtgacggatttccaggatggggcggaagttattttaaggtcttttcatcgaagaatttaaagacatggaaagaagagactgtgattctggagatgggcaaaaatgtgtcttgggcaaacggaaacgcatgggctccctgcatcgaagaaaagaagatagacgggaagtataaatacttcttttattatagtgccaacccgacgaccaacaaaggcaagcagataggagttgccgtagccgactcccccaccggacctttcactgatttgggcaaacctatcatcacctcttctcccacaggacggggacagcagattgatgtggatgtattcaccgaccccgtatccggcaaaagctacctctattggggtaacggctacatggcaggagccgagctcaacgacgacatgctgtccgtcaaagaagagacaacggtagtattaactcccaaaggagggactttgcagacttacgcataccgtgaagctccttacgttatttatagaaaaggagtttactacttcttctggtctgtagacgacaccggttcccccaactaccacgttgtttatggtaccgcccagtcaccactcggtccgatcgaagtagccaaagccccgatagtactcattcaaaatccaaaagaagaaatctacggacctgcccacaactctatcctgcaagtaccgggaaaagacaaatggtatatcgtataccaccgtatcaacaagaaccatctgaatgacggaccgggctggcaccgcgaagtatgtattgaccggatggaattcaatccggacggaacaatcaaacaggtaatcccgacaccataacaccgcaacagagattcatactaaaataataccaaaatgaaaaacgttctgactgcgacattcctgacctgcatctgcataacaggcagcgcgcaaataaatcatggatatcctatagaccctgtcccctttacttccgttaaagtgacggacaacttttggggacagcgccttcaagcaagccgtgaagtaaccatccctctggcattcagcaaatgtgaagagacgggacgttacgaaaactttgtaaaggcagcacatcccagcgatacctacaaagtagagggcttctctttcgacgataccgatgtatacaaaacaatagaaggagccagttactctctgcaaacctatccggacaagaaactgcaaaagtacattgacagcgtactcgtcatcgttgccggagcacaggaaccggacggttacctttatacagcccgcaccatgaatccgaagcacccgcacaactgggcaggaaaagagcgttgggtagcggtagagaacctaagtcatgagttctacaatctcgggcacatgatagaaggagctgtagcacattatcaagctaccggaaaacgaaacttcctcaatattgccattaaatatgccgactgtgtctgccgcgaaatcggcaacggccctcaacaaaagaaatacgtaccggggcatcagatagccgaaatggctttagtcaaactatacatggtgacgggagacaaaaagtatcttgatcaggcaaagttcttcctggatacccgtggatataccagccggaaagacgcctatagtcaggcacacaaacctgtggtagaacaggatgaagccgtaggacatgccgtacgtgccgtatatatgtactcaggcatggcagatgtggcagccatcaccggagacagcagctacatcaaagcgatagacaagatttgggacaacattgtttctaaaaagatttatataaccggaggtatcggtgcacgccatgcaggcgaagcattcggcaacaactacgagctgcccaaccagtctgcttattgtgaaacctgcgccgctatcggcaatgtatatatgaactaccgtcttttcctgctgcacggagacgccaaatatttcgatgtcctggaacgcacactatacaacggtctgatatcgggcgtatcactggacggaggttctttcttctaccccaacccgctgtcttctaacggaaaatacagccgcaaaccttggttcggctgcgcctgctgcccttcaaacgtcagccgtttcattccgtcattaccgggatatgtatatgccgtgaagaacgatcaggtatacgtgaacctttatctttccaacaaagccgagctaaaggtagacaagaaaaagattctgctggaacaagaaaccagctatccctggaatggggacatccgcctgaaaataacgcagggcaatcaggacttcaccatgaaactccgtatccccggctgggtacgcggcaatgtacttcccggtgatctgtattcttacaccgacaatcagaaacctgtctaccaagtatccgtaaacggacagacagtagaaagcgatgtcaatgatggctatctcagcattgcccgcaaatggaaaaagggagatgtggtagaggtacatttcgacatgatcccccgaatagtaaaggcaaatcccaaagtagaagccgatcacggacgtgttgccgttgaacgcggccccatcgtttattgcgcagaatggccggacaacagattcaacgtccacagcatacttctcaaccagcatccgcaattcaaggtaacagacaaaccggagttactttacggcatccgtcagataacgaccgatgcgcaggcattaagttatgacaaagcaggaaaactggtaactaaagacgtagaactcacattgataccctattatgcctgggcacatcggggcgaaggcgacatggaagtatggctgcctatcgatgtaagcgccacgtcggcacagccacaggaagcggcacaatgggaagataacggattctttaagaattaataataagctgagtcgaagataagaaagtacagagagctttttaggcacggatttcacggatgaacacggcttttattcattaagaccgtgtaatccgtgaaatccgtgcctaaaataatattattatatcaatcagccattatcttcacatccggcgaaggagcccggaaccaatattccgtcacttttcttccctgtcccggaaccgtaaaagacaacttaatcagattatcatgcaatcgttccacactgatttcattctttactccttgtataaaaaccggatcaaccgatttttccaccatctccacgtaagtgccatccgatggcaaactgtactctccctgacaatagatgatggcatttgacctgccgttcataccggctgtcattatattcatgaatgtctgatcaggcgatatgatctttataacaggcaataacagaattttatatccatgttcgcccggttgcacaacacaactctgccatactccttgcaaagacctgttttccacttcttgtccgataggtactacaagttcgggaaaagtaggtctctgtgcatccggtctggacagattaaacattatcggagctgtaaaacgtactttcactgcctcgcctctatctattcccggtttccatttcggcattaatttcactacgcgcaaggcttcttcgtccagcaagggatcgactcctcttacaactttagcctgatccaatgttccgtcttccattatgacaaactgtacgatcacacgaccggaaacgcctttcttctgtgcttctacaggatacttaatatttgtagtcaaaaacttcatcatcgcctgcatcccgcccggaaactccggcatttgatcgggcatcagataaactccatcactatctaccttctctacaggcttttgctgggcaaacgaaggcaggcataccaacaatgcgataaacaaaccgaataattttgtgttcatggctatcatattttaaggttaaacaataccgcaagatagtgcatttttattgaaacacagcatgatttgtctatttctttttcacagatgtctatttacttattatccttactttattactgccacaaatcctccacgaggaagacatgacatatccattttatcgtttgataactggatgttttcttcgatggcaaaactcttatcgtccaccccatccttaaatacatccatcgtttttccttcaacttgcagaggaaccaatgaaaaagaaagagttttattctcgttagttccgttcaatcctccaatataccatacatctcccttacgtcgtgccagtacgatgtcagtacccggatagccacacaacagttttgtatcatcccaagcagtaggtaatcccgaaaggaattctcttacttttcgaggtaatgaactgtacacctccggcctatcaggcatatgctgcaatgctgactcaaacacaacagacaaagctagttcatgcccacaagtagtgatatgaggatgttgggaatcagagaatgtaccaggtgtataatccattgagccaatgacatttctggtaaatggcaatgttacattatgttcagcagcacgatctgtaagtattggcttattgttataccactctgccccataaacggcttccatagtcatcagatgaggataagtcctttgccatccacgaggaatagtagctccatgaaaattgaccattaatttatatttagctgcatcttccagcaaatcaatataataatccatattagacgaataatcatcaggaaaaaaatcaatcttaacccctactacacctgacttttgaagccaagtatattcctttattctgttttccttactattcaagcggtaaagaggacccggccccatccaagcagttgacgaattataccaaatcataggctttatatttcgactaagagaataggttatcaaatcttcaatatctccaccgtttgacatttcattccattccgcatctatcagactatatggccacttcatatcaacagccaagtcaatgtagtcttttacaatcttgaaatttttggaaccatgattatgcgcccagtatacccatgatgcagagcccggcataatccaacttgtatcagaaattttgttaggttcagagacatctgtcactaaagtagattctacaacatcagacaaagaacctatcataagaactctccatggcgatgtgaatgaatcacccaaggctaatttatcatctgtcatccgcacttgatattgattcatatcatttccattatacaatctggaaccactatgtccacgaagtatattggcctcagttatcaacacaaacaatgaatcggctggttccaaaagtaatggatagccccacatattgtctttgcctctttctgctctggttttcaatggatagaaaccttcataaccaacagaataattctgtatccatcttttcgttccttctggaatatagtaagctgtatgttcagatgtcagactatccttatcttgaacagatggtaagctatatcgaaatacaatcccgtcatcgtaagccctgaaaacgatatctaaggtttctgccttctcattctcaaaccgaaatatcctttcatttcctctattctgacaatgacttcttttaccggtaagcatcacataatcatcttcaattagtttagtaccggacacagatttcaacctgatgttatcggtaaatgacataagctgggtttccaagccaattcgggtatcagatagaacccttctggaagttttaccatctttgtactctacattaaaaaagactttgccaaaaccgtctttttcagtatcttcctttatttcaacagaaagacatatcttcccattaggagaaatcacacctgtatctttttgagaacaagaacagaatggaatacaaatgagcacataaagcagtaattcataacttaaacaattaaaggaatgtttcatacactaaacagttaatataaataaataaactcatccacatcgatataccccgcatccgctatattattaaaacagtaaatcccaatgcggcttccccggtaatatccccattcaagttgatatacctctccgaacggggtaaacttcctgccatctgtactatatgaaaattggctttttccatccagcccccatacagatttaatccacaccttgtttccctttatcgcaggacctgtgattttctctttattggtctggaattccagattccggtctttgccggactggcgtacccccaccatggcataactcttagagtaatgacacagtccggctttctgtccgtcaaccatgccctcaatgttcatttttacaataacttcatttttgtttgtacgaaaacaacgctgagtcaaggtatttcccgctttcagcaaattatccatgactaatggacgaaaagcttttaaccgcaaatagcctggtctttccgtcaatgaccacatctcgtcccggggctggtagttccattcccattgaggagaaagtaccgacttgctaaaatcatcagatgattgtggagtccgaaccggatactcattggaaggcttggccgcttgccataccattgtgccaatgccatcctgcccaacctcaccaataatcggccaaccatcgacccaatataccggtagcagactagcaatccgacctgcccagtcacccgtaccatggtgggtaaagaaataccacttcctgtcaggaccttcaacaagtccgccttgattaggctcattatattcacgctgtacatgacttaattgtttcctttcaagatacggtcctgtaattgaagaagaacgttgcatcatgatatatctaccgccatttttaacttcactgaaaaaatgataatatgttccgttgattttataaagtttacttgcctcgcgaccatacccctcattaattaatattttagagttttcgatcaaggtcttcccatcaggtgtcatccggtacaggtaagttttgtatttatcagcaaaataggtacctacaaaatatagttgcccgtcatcgtcaaagaaaggacaacagtcatcccatcccttttctgcttttacacagtgcaacggttcccacggtcccgcaggatcggtagctgtcgacataaaataaccttcatccggtgtaccgaaatacacatagaattttccctgataataacggattgcccctgcccaaatacctcggccataacgattcatacgcgtccagttcatttcttcactgatctgtctcagatcagaaaccacatgacctttaatcgtccagttcaccaaatccttggaatgtatgatcaccatacctggggaatattgaaaggtagaagaaatagcataataatcatcccccacacgaatacaatcaatgtcactgtaatcggaaggaaggacaggattacaataggtgccatcttcctgatcgccccaagttgtccattctccccacttgtaatcattctgtgcaaatacatttactgttaataaagtaaaaatcaatactacaatacatgtgttggttttcatattctttcttatattcatacactgtgttacaggattatcctgaattctttttattctcaatctctttcaaataatataccacaaatgtagcaaatcaatagcttatattataggattaatacgatttagaataatataatatcgacataaacagctatagcggaattaatcataaaacaatatcgacattttatttaaaattatcgatatcaaaagagtaatatctattttttatttatctttatctctacattaataaaacctgtatactatggcatcattcgtcgataaattgcacccgcttgtattgaacataggtttggctattcataatgccgactggaactggaaaaatgtcagtagccctttcacacgtttatactatgtgacagaaggtacggcacaaatcttaatatcaggtaaaatccagattttaaaagccaaccacatgtattttattccagcgtttaccaaacatagctatatctgcaactcttatttctcccactattatctgcatatctatgaagaacaccagtcagacaacaacttactggacaattgggattttccaatagaaatacctgctaccgaactagatttggcattatttcagcggctctgcgctataaatccacatatgaccttacagaagtcagaccctacttcttacgataacaattacacacttatgcagaatctgctaaaaaacaaacaacgaacattatccgaaaaagtagagtcaagaggtattgtataccaattgctagcacgatttctacaaagagctcaaataaaaatggtattaaaagataaccggatagaagaagccatccactacatccgtaagcacataaatgaaactattgaattaggagtattagcagagaaatccggcttatcaaaagaccattttattcgcctattcaaaaaagagacaggagatacacctttaagatatattatccgcaaaaaaatagagaaagctcagctcatattaataaccgatgatatgtcaatcaaaaatgttgcattaaatctagcatttgaagattattcatacttcaacaggttattcaaaaaaatcaccggcgttactccccaagaatatcgtacctcttatcattcttaataaaaaaggaatagcgtagaaggtgctattccttttttcattaacaaatagtaaacgattacatagtctcaactaatcttcataaagataaaacatacgttccatcaatttccatttctccgcagacgagttcaaaggcgaacattcttgaaatctggatacatacttttcccagtcagcctgtcgcggaagatgagataatttatccatagctatctcccagtcaaagtcaagcggagtttctataatcataaagagttgtgatcccaatatataaatttccatttccaaaatgcctacagcacgaattcccgctctaatttccggccaagctttttcttcactatgtatcttacgatactcttcaatcagcatcggatcatttttcaagcttaaagtttggcaatacctcttcgtcggtatgtcatactctttcattttgtatccctgaatatgcggcatgacagtgctttctattttctaatcttaaaaacaggagctatatttttcaatgacttatttggaatattgacaataagtcccttatctgtacgtgagaaaggtacttttccgtaaccaagcaattcaactttacttatcttattgggatatagttcattcccttccgctaaagatttaattaatattttcccatcttcgggccattccaagactgtagcatacagatttttctctgtctgtgtaaaacgtatttcttttgcatcggctttactataggccccttcgttaaatccctgtgctttaagttgaacatttccttccgctataggtccctctccaaatactttccaaggacgtgtatcatagattgcttctttattaatgttcatccaagcaccaaattcattcaatattttttcttctttttcatcaaaagttccatctgcacgcaacggaacacttaagagcaagttaccatttttgctgacaatatcaactaataattttacaacgtcagatgctgacttatattggttattatcatatacagacgtactgtagtgccatccgccaaggcacgaacatgactgccaggattcatctattattttatttggagctccacgttctacatcccataccaaggctttacgttgatcagcatcaagcatcttaccaaacattacagcattcaatttacccttttgcgtagacatattatgattatagaaatgagcagcaatctttaaacctgcatcacttataggataaaaaggtgccactgttacatcaaaatataataaatccggattatagcggtttattacatcaagtgtacggttatagaaattagtacaatactcctgtgtcggcaaacaaactccatttccccatgcccattgcctgtgaattgcaccattatcccaactattctgactcaacggatgattctgagcatacaaatcctgaggatcatatccttcccaccattttcccttgccatcagctttcgttaatttcccatcatatgggacaccttttttaggtccttgagtatcatgtctttgagctgtttcataccaactccaggcatgatcagcatgcaggctgacgccaaaataaagtccatgtttacgcgctgctttctcccatcctttcaatatatctttttctggtcccatattgacagagttccatggttggtatttactatcccaaaggtccatgttatcatgatggttacccaaagcaaaaaaatactgagcacctatttttttatagaatgcaaccaacttatcaggattccatttttcagccttccataacggaataatatctttaaagccaaattcagaaggatgaccgtaattcgctacatgatgccgatattctcgtgaattttccatatacaaatgacgagccatccaatcaccgcttccttccacgcattgaggtccccaatgagcccaaataccaaactttacatttctgaaccattccggtactttataattagacaatgactcccaagtaggttggaattttccttgcatcataggttcatcttgttccgagacaggaacttgataattttgagcagataaagtccccgccacgaacaataaagacagtaacagtagtttttttgttttcataaatattacgattgaattattgattacaaacgtactgcttttttagtagacattaataggatgaatacgatctacgataagacaatatcgacatctatcgtaatcaggaaagcatatagctgattactgtccatacagttctcatattgccatcttcctctttggcttattaataaatattccattcccagataccggggactccttttaggattttaattctcagataacggaaccttttattcaagacatcggtatgtggtgaacacatcttcctatcttgatggacagcgaactcttgccagacttttccatccatcgatgcttcaataacataagcatgtccggcagtagggcgtacaaaataaatttcactgcgtctgaccttctttacagtacccaaatctgccacaatccatggattaatactatcttcggcagcagccatccatcgggaaccatttgctccgtccaccgcaaaagaaggaacaaaatattctgtccgcagacatgtcgggtctttcatcggttcaatcttcaacggcacttcaatactagacgcataaactgtatctattttcatttttttatctgatttcaccttcttcaatgcccccactccatccattgttagttcgacagggcgaatcgtaccgtcttcattaaatttcagttgattcacatatgtctgacggtttgtacttcgcctgccaaactctaaatatgcgaaataataattatccgtaccctcaggatgaaagacacaaccatgtcccggtccgaagattccccgttcataattggtagtagatattatatcctgttcaggagcttcaaaaggtcccataggggaaacccggctcattacatacgcatattgatatttctcatcccctccgatagtgtacaaataataatatattcctttacgtttgaaaaagataggtccctcagagtactccttgcgaggagtagaaattacctgtactacagaatccaccgtaatcatatcctcgttgagtttggctacatgccttcgtccccaaaacacataagcctgcccatcgtcgtcaacaaagatttcagcatcaatcccgcccggattcttactctgcaataaagtagaaggagtaaaaggcttatagaattcgtctttcccacgtgccagtttaaacggtccttcaggcttatcagctacagcaggatacatatacccattgatagtgggatatatataatatttaccattagcaaaaattgctttactgggagcccaatacttctcctttgcagccgaagggaagtaagttccatcaaaactccagtgtacaaagtcttttgatttccatactaccggagggcctgatgttttaagtccctgcccatagccatcagtagtggcatagcaataaaagacaccattaatttcctgaatactcgcatcggcaatcatatccggaatcaatgcattgccaaaaggattattgtgctgagctttcactttccctaccaacatcattaccagcacaaaactaaaaaagatctgtttttgcatactattatctattatccaaagttaatgcctgattcatacaaaaattacagttgaataagacaatgcaaacgtactttttttctggtaagtttaataggataaatacgatttacgataagacaataccgatatttaaagtaacagcatttacaaataaaccatattgacaggctactttatacaaagaatacctccttgagggcggatttccaactgcaccttaccgttttccttcactttcagtgacgttaactccggttctccctttttatcatccttataaagagccaccgtctttccggcaaacatttccaaatccagttttagtttcagcggttctttgccggcatttacagctgccagataccaggtatctccctgacgacgggccaacaccacatacttccccggatagccatcgacaaaccgtgtctcatcccacgttgtgggcacccgcttcataaagtccatgcaaacagccggaacatctttcagattgttaggagccagtgcaaagttttgaaccggattctgcaacagaacggtagtcgccaactggaacacgtccgtagtccggcgtgttgtaccgccgtcgttattacggttcaggcgcttattcagaaagcagccgccaaactccatcgatcccaccgtattgcggataaacggatgcaggcaagtattgaacgcttcctcatcacagaaatgctgattgaacaccatattttccgaagccagcactgcttcactgcccacataattcggatacatacgctcccatccgcgaggtaatgtgcaaccgtggaaaatcaccatcaatccgtgatcgtccgcatcactcagaatatcttcatacagccgcattgtctcctgcttgtcaccgccgaagaaatcaaccttgattcccttcacaccgagactttgcagccatttcatttcacgtttacgaatgattgcattatccattcggttcaccggtccctgttcaatgtcattccaatagccggaagaactataccacaagaacaactcgacacctttatcgcgtgcatactcaaccagcgacttcatacgctgatgcccgattctagtatcccaccagttatcgatcaacgcatactcatatcccatagccgaagcaaaatcaatgtaacgtacctgatcatcatagttgatactgccgtcctgccaaagaatccagctccacgtgccacgcccgaaacgataatcatgttttgtttcataaagcgggcttaccacatcccacggaacggttgtttctacaatcggcttcagatgatctcccactgtgatggtacgccacggagtagcgccgggcagtgcaaaagcaggagcgaccgttccgtttccattattttcttccgccatcggaaaggcgaccgtatataaattcccttcactcacatcactcaaacgtgaaccgcaataacgactgtccacacccgtctcgctgaccagcacccaaccgtcatttcctatacgaaacaaacaagggaacgtatacccatgtccgtactgcgaacggtcgctcatcggcgcatccgctttatattcttcttcataactgggtttcgtacgtttccagccaatcatcgcatcgctctgcggacacaagaaagtagtagtctgctccggaaagcggaaacctgtttgttcttccttcaccgtcacactcgcttttcctccctgatgcggcaaagtatagcggaaagccacatcattatcactcacccgaaaaataactcccagcttttgtccctgctcattctctaaatgacaagtcagttcattggcacggtaatgtacgttggaaactttgatacgtgtctgttgataaacagtatcgatcttgtcgacggaatgtccggtcagtttaagattcttcgtaaaatcaccgatattggtattcatgcctaaaggagacttttccaacatcgtctttccgttgtaactcacagaataacaaggcttcgtctcgttttgcacaaataccgccaactgcaacttttcgtccggtccttttacaaccacatcctgtgctgcaagagtgcttataccaagaatcgctgtcaaagtgcttacaagtttcttcataatattatttttcttttatgattaaatgtcctcattgtaacaaaagcaaaaatagagaatataattatattcgcatacaaactttcatcgtttgcatgatttccccccttttttgattgatatgcagacattccctcccgaaaccctttacaaaaagaacagtttatccaagtataaccccgactttttttatctttgcatcatcgaacatcataatccttatcccaatggcggcaaataaccagaaaaacacccgaatactactattcctcctcctgtgtatcaggatgacactgacggtggacgccaacgacttcctgtttacatcgatcaacacggcacaaggattgagcgacaaccaaatacgctacatactccaactccccgacggaagaatggtattcaccaccaacgggaatgtcaatctgtatgacggcgtacatttcagctaccttcaccgcacggcagaagacatttccccgctgaaacagtatgaaggatgttaccgcatctatcaatgcggagattcactcctatggattaaagattatcataaactgatgtgcatcgatctccatcaagaaaaatacatacctcaccttgactcctatttccggggaaaagagatacacgaaccggtagaagaccttttcgtcgacaattcgggacgtatctggctacttacttcccaggagttgcgggaactggaaacgggcatccgtctcaccctgccggagaatgaacatcgaaagctacaggacatacattcggatgaacttgcggtttacctattctatcataccggtgaagtcgtttgctacgacccgaaaaccaggaaacagttgtatgacagagctgcttatcccgcctcggaacaggaggacttcaaccgtacttctctcgttgtcaaaagccaaaaaggattctaccagttacgcaacggccgcaaaggaggattcttctactttaatccccaaaaccagacatgggagaagctgttcgaacagaactacacgctcaacaccctgatcatcactccacagggcgataaagcttatatcagttgtgttcacggtttctggatcatcgacctccaaagcagggaacagcaatacatccccgtactggaaacaaagaagggaaagctcgtttcgaccgaagtcagcaccatctttcaggatgcccagggcggattatgggtaggcacactcaatcggggattactctatcatcatcctgccacacacaaactgattcacgtcagccgcactgctttccccgcatcaccggaagaggacatcgccgtcaaagcttttgcagaagatgataacggcaatatctatctgaaaagccattccacaatctatcagctagctgtcaatcaggacggttcacggactctgctacctgtaccagccttatcggtctctgcagaattggcaaaggaattagatcaaagaggtggaaacaaatattacagaaggcaatcatacaccgctctatgcaccgacacacgtggctggacatgggcagggacagccgacggactggaactcttcaccgatcaagagcaaacaccggatagcaaaccgaccacacaaacagcagataatcaccccgcctcatccaatacccaagcccaccgcattttctatcgtgaagacggactgagcaataacttcgtacaatcaatcatcgaagacagaaacaactatatctgggtaactaccagcaatggcatttcacgcatccatatcaatccggagaatcaggaaatcggctttaccaacttcaatcaactggacggggctttagaagaggaatatatacagggagctatctttgaatcttcggatggtacactctatttcggaggcatcgacggctttaccattttccgtcccgaccatgaatccgccactccggacctgccttacaaaccggttttcaccaacttacatctctatggtgaaaaagtaaacacgggagaaaagtacggaaaccgcatcatcctgccacaagccgccccttacacaaaggagctagaactggactataaccagaactttctgaccttcgaatgttcggcactgaactacgtgaacagcgaacgcacctactaccgctaccaactggaaggcatcgacaaacaatggatgaacgctttcgccagcggacaagggaatgcaacagtcggcaacggcatcctacaggcctcctataccaatttaccgccgggagaatatacattcaaagtcgctgcatccgacaaccagttacaatggaacgataacatcacaaagatacacgtcatcatccacgctccctggtggaaaacgactaccgcctacgttctgtatacggtcatcgtgttactgattgtcttagcaagcatccgcctctatatctatcagaccaagaaaaagatgaaacagcaacataaagaagaaatcctgctgctccgcatccgcaacctgatagagcaatgcaacagctatgaagccgaacagaaagcccgttcggagaagaaaagccacccttccgtctgcgacaggaacgaaacggcagatgataatgaaaagccaaacggcatagaaccggacagtgcagaatccgcctttttagtgcaagcgatagaactggtagaaaagaaccttgacgtcaacggctactccgtagagcaactaagccgtgacctctgcatggaacgcaccggactctaccgcaaactggtgactttgctcgaccagtcccccagcctctttatccgcaacatccgcctccaacgagcagcgcaactacttgccgaaggcaaactgagcgtaaccgaaatagcggagcgtaccggcttcagcagttccagctacctaagcaaatgttttcaagaaatgtatggatgccgtccctcggaatatacggagaaagcgaagaaatcaacctgattgttgtttgtttcaacatagctattgtccgcaaaacgtccttccatcctacctttgccgtatcataaagcacttaaagaaaccatgaaaatgaatctaagaaaaacaggcatcctgttggcatgggccatgatcattgccgcaaacggtacggcacaaaacgtacaacgcacttcccaaggcatcaagtatgcagcacaagggatgaacgtcagtgtagaattttattcgccttccatcatccgggtatataaaacgcccggcgagacagcttccgacaaagaaagcctcgttgtcatcaaagcaccggaacaaaccccggtttccttcggtgaaaacgggaaaaatgtaacattgagcagtcagatgatacaagtggaagtgaaccccgaaacaggcggcatccacttctttgacaaactagggcaacggctgctgaccgacaaagactacggtacacagtttacccctttcaatgacgcaggcgtcccctcctacaatgtccgtcaggctttcctgctggataaggacgaagtgatctacggtctggggcaacagcagaccggcaaagtgaaccaacgcaatcagaaactctttctccgcaaccagaacatgagtatctgtatccccttcatccactccatcaaaggctatgccctctactgggacaattactctcctaccaccttcctcgacaatccgcaagaaacctccttcgactcggaagtaggcgactgtgccgactactacttcatctacggcggcaacgccgacggagtcatagccggagtacgcgacctgaccggacaagccccgttgtatcctctctggacactgggcttctggcaatgccgtgaacgctacaaaagtccggacgaactgtgcgaagtcgtagacaaataccgggaactgaaagttcctttggatggaatcatccaagactggcaatactggggctgcaacgagaactggaactccatgaaattccagaatccacgctacatcaacaagatgggtgacccggaatacatgaaattcctcccgaacggagaagacaagaatgccgactacggcactccccgcatcaaaagccccaaagaaatgatcgactacgtgcacaagcagaacgcccacatcatgatctccgtatgggcctccttcggtccgtggacagaaatgtatcagaagatggacagtctgaaagcactgctccatttcgaaacgtggccgcccaaagccggagtcaaaccttacgacccgtataatccggcagcacgggacatctactgggaagcaatgaaaaagaacatcttcgacctgggtatggatgcctggtggctcgactccaccgaaccggaccacatggatatcaaagaccaggacttcaacacgcagacctatctgggttctttccgcagggtacacaacgccttccccttaatgtccaacaaaggcgtatatgaacaccaacgcgccactacttccgacaagcgcgtattcctgcttacccgttcctccttcctcggacagcaacggtatgcttcccattcatggagcggagacgtaacttccgaatggtccgtcatgcgcaagcaactagcggcaggactgaactatgcgttatgcggcatcccgtactggaacacagacctaggtggcttcttcgcatggagatataacaataacgtaaacaacatcgcctatcatgaactgcacgtccgctggtatcagtggggagtattccagccgatcatgcgttcacacaattccagtccggtagccgtagaaatctaccagttcggcaagaaaggcgactggtcatacgatgcactggaaaaatacactcacttacgttaccgcctgttaccatacatctacagcacttcctgggaagtgaccagcaaagcaggcagcatcatgcgccctctcatgatggacttcccgaaagacaagaaagtgctcgatatggacaccgaatatatgttcggacgcaacttcctggttcgcccggtgacggattcattgtatacatggcaagacaagaagcaaaacggtcatcagaaagacatgagcaaaatcggaaagaccgatgtttaccttccccaaggtgcccgctggatcgacttctggaccgggcaaacactggaaggcggacagaccctgcaacgtgaagtcccgattgacattatgccgatctacgtccgtgccggctctattctcccctgggggaccgccgtgcaatactctacggaaaagaaatgggacaatctgaccatccgtatctatccgggagcgaacgcggaatttaccctttacgaagatgagttcgacaattataactacgaaaagggagcttactccaccatcaccttgaaatggaacgaccaagaccgtacactgaccatcgacgaccggaaaggcagctataaaggaatgctgaaaagccgcaaattcaacctcatagttgtagaaccgggaaaaggctgtggcgacggagattcaaccacctttgacaaatccatctcctatagaggtaagaaagtgattgccaagctataaactgacgataatcagataactaacacgagttcgatatggtccatcttgttggattatatcgaactcgtgttccttagtaaaaaacatacttcttattgtcacttatcaccttttgaggataacctactgattattagccatcattgggtgataataagtggtgataatagggtgacaatagccatacatcacacattttattgtcacctttccccatcctattacttgttacttattacgttcccctatatccagcccctaaccttatacaacaaataccatatactaccggtatctttcacttatagtgcctttattcttccattaagacactgatattgttagttgttcacggccgtggcaagagttgatcacgaccgtgagcaatgctcttcacggatgtgatcagacctgttcacggccgtgaacaactaaagatatcggtgtcttattcctactttccctataggaaaaagcaaagatgtgtacttccctaataatggttgacttgtttatctctaatagctgctatgtgttgactagaaatattactaaccctggcagctgtttactttattatttattattcctgcctccggtttacttatttttttcttattcctttaaccggttgactcttctctttgaaagaagaaaaaagaaaggaactcaccctttttcctctttctatcccgctagcagggcattcttggtcttttcataagcaaatgtacatatttatttttaagcaagtgctacattcagatacttttctctgtagcttatccatcttttcctgataggtccttgcatttctcctgcctgtaccggggtaagcatatccaagctcatatgaggcctttcgttgttatagaagtgaacggctgttgctacagcttttctgacttcctgtattgaactaaagcgcattccttgcagcaattcattctttataatgccattcacacgctcagctatggcattgtccttgggattgccatcctctgtcatgctgggaagaatcccgttatgtcgtaatatggcaatataatccgcactggcatattgtacgcctcggtcggagtgatggatcaaacccttaatctcctttgcagctatgcgtctgactgccatttccagagcttccactgtgtaacagcttcccagagtatcacctacgcaatacccaatgatctccttcgtataggcgtctgtcaccagagacaggtagcagaacacataactgccgtcaggcaaccatatggtaatgtaagtgatatcactaacccacagctgatcaggatgttctaatagcaatgtcctggttaaatcaggatactgtggcaagtgatgagaggagtctgtcgtacgtggagcccgaaaacgtttgcgtattgtcagcttatacttggacaatatagcacagaaacagtcacgcccaacaaaggcctggctggtgccgaactcattacggtacatcagccaaagtttcatccccccaataccagggtcctttgaacgcacacgtttgacaaactcaagaacaaaacgttcacgggccgaactatccgtactatggtcaacatacttataaaaggcttgctttgttacaccaaacaatttgcaaagagagaccaccgtataggcatgcctccctttacaaagcctttttattgtttggtaccagctttttttcggataggaagattaaacatctcctcggcaacatcaatcatcgtatcgaaggcgtgcgcacgcattttagcatctttaagctctgcacgtaaacgctcattctcaagacgtaaggcagtaattgaggaggattcctccgaggacttgggagacttgtgctttttcatataagcggatatttcaggattagaatcctcaaagatacgaacccaacgccaaaatgtaatacgggcaatccctttttcttgggcaaaacgagaaactgagaaattcgaacgatagaaatcgccaagaagttcaagctgataaggactaaaggtcatgtcactctttttcatcttttattcattttagttgatacttatagtagtcaaccaaatccagggtaagacaatgcaagaggttaaagagaactttagtactatcttacggctgattacactatagacagcaaacgaactacccattcggtgaaagatgaaaaccatcttttctattatgaagaagaaaagagaaggtacaaaagtcaataatacctaaacctggactgactaaaaagtcgattctatctcgaatctcctccttcgggaaggaggagtggtcgaagaccgaggtggtaggaaaaataatgtttgttcctatttctttgtaaatgacaggattatgtattcacctaccacctccccctacgggtactcttccttcccgaaggaggagatttaggatactattgactttttagtcagcccctacccacagggggagatgataggtgagcacccctcccccaaaataaactaacccctattgaaaaccagtttattgcttattttttcccttttgtgtcttcaagcggatgaccgtgaacgaataagcaggcaattcctgcttgaagctggttcctgcctctatcgtatccgtcaccggaagcggagtcgtctcgggtgcacctgccagtacagtccgcgtagcggaagactggataccatccattcccggcaaccggacatccgtctctatgctgacgggcaacagattcaccagtttcacaatcacatcccccgtcttactatcacgaacgatggaagaaccaacacggagttttacgcgaccgtcctgattatcaaggtttatctgtgaagggatgtaatggtcgcctgcgttctgaccgtacagtttctgcacatagtatcccgttgtcggtcttacttcccgattgttgaagtagatcaggtccggattccactgcgtccgcccgtcttttgccagcagaggagcataagaactcatgtgcactacatctccattccgttccaaagcagccagataaagtgcttcggtcaaagctgtttccatattcgctctgcgtccggggatgtgagtggcatattcgcccagatatactttcgtctttttagagcggtcgtacttgtcatagaagtcctgattgtgcaggaaccatcccggagactgataataatgttcgtctaccatcggaacaccgagtttgtccgccagtttccagccttccacatagtctgttccctcattgaaaggacctactgtgccgacaacgattatctccggatatttctctttgatagcaaggtatatcatcgtgaagcgttcttcgaagacatcggtgatcaagtcttcattgccgatgccgatatatttcagattgaaaggcttcggatgaccggattcggcacgtatcttgccccatttggttttctttgcatcaccgttcgcccattctatcaggtcgaggatatcctgaatgtaagcacccatctcgctcatcgggataccgccttgctgaccgcctctcaaatcgccatgacaagcggaattctgacaaggtacacctgccgccagcaccggaagcggttccgcacctatatcttcgcagaactggaagtattcataataacccagtcccatgctctgatgatatccccaaaggttacgggcaggtttacgggcttccagcggtccgatggtgtttttccattgatagatgttcttcaaaccgtctccatgagccacgcagcctccggggaaacggacaaagcgcgggtgcatatcggcaagtgtctgtgcaaggtcgggacgcaaaccgttctttctgcctttgaatgtattctgcgggaagagagaaatcatatccagttcgatttcacctgccgattgcgggtgaagttccagatgggtatcggcggacgctttcgctgtcagcactgctttatacgttttccacgaacgggaagagacggtaactgtcgtttcaccctgtacggtgccgtcggcatctacgaggcgtaccagtagttttccggacttgctaccttccgggatacgggcaaacagggagaaatcatatttctcgcctgctttaagggcgattccgtcaaaaccggtgttggtcagggcggctcccggctggttcgtcttcaagacggcataatgcggattgttcggatggatagggtccgaagtcgatatggtaaaggtggcgttttctccttccagcttccatgaatgggtgctgttccagttcttgtccccttcacggtcggacggctcgtattcgaagtcccggttctggatcagttcggcatacaggccgccgtcggcggagtagttgatgtcttcgaagaagatacccatcaataagtcgctgatttcttttgtttcttccggttgtgctgtgacggtggctttgaccgatttcagtccggcaaagcgttctttatcctgtacagggcgttcgccatacagggagttacggtattggttccgttcgtaggtttgggtcagtccgtccactaccgaccagggcacttggctgacagttcccgtttcttcgtgtccggcaatctttgctttgactcttgttccttcaaaatcggaagtcgtacggggatattgctgagcttcccagtagatcaggtcttttgatctggcctgaccgtatccatcgtggtcgttcaacttccagacacagagccattccccgccggggagttgtttcagattcgggtcgagcatcttcttctgcgatccccaacggctgtaatcgcaacgaagatagccgtagtttcgtcctatttcaaaccaatgttttccgtccatgctccatgcaaagcggagtccgctacggccgtcgtcacctcgggtggcgtaggcaaaaagggatactgaatcgggagtagcagtcgtttcatgcgttgcggcaaatgcggccggctgcaatgataataataatacactaaatagtagaagtaaatgtttcatggtataaattataatataagatctctgcaaaaaaagagtatgtattcactaaaaaagatctgatactctgttatttcctgttttcccaatgacttctcagtttggcggcttcttcttttgtcaaatggatcaccgcgccgtgtttgggcgacgagaaattagtcgtcttcatcactccttcgttgaaacgtcccaggttcttgaaattcacgaagtcggaagtctcgatgaaagcgaagttatgggggttgatgccgtagacgtcgtacatcaatacccatttgtcttctccgatacgcttccagaggttgggagcttcgcaggccctgggttcgaagtcgtaccagcgagggtcatattcgtaatcaccgttgattcggtctgacacggcctgtttgattccggcgcctccgtcgtgcgaaacgtagaacatgcgataccggtcgcctaccttggtgatgtcaccgtcgatagccgatattttctcgttgggatactcgaagaggatttgcgggagtgtctctatccggtcgaagtcatcattgacatagacatagtacagtttgttcgcctcgttcttgaaacgcatggtgaagtaaatcatcagtttacctttcttgtcatcgtaagtcacttcgggcgcccatacgcagccgatttcacccaagcctgccgataacaggtcgaaacgggcattggtacgtttccagttgatcaggtcccacgatttcatcagtacgagtccgcggttgtttccccagccgtattcttttccgtcacgttcccattcggtatcacggaagccgtctttctgcgcatagatgtgcaggtcggtcatggaaaggtagaaagctccgtccggtccacggaagatgtgcgggtcacggatacctttttgcagggcgatggtatctccggcgatcaccggtttgccgtcgttcaaggcagtaaatgtatatccgtcgtcactgacggccatataaaggctgtgcgtctcgtctttatggaagaccatcaagtaagcccccatgtccttttcctgcgggatggcgttacggtaacggaactgacggaagccggcgctgccttttccggaggaaagcagtccgatgcgtaaagcgtagaagccgccgtagttgttatggtgcagctgagatacatccatgttttctaccagcgtagtccattccttgccgtccttgctgactgctatccggacactgtttccctgattctgtatcttggcgaggaagcgtttgcccaacttgttagggagggtaaagctgttttccgcgtttctgtagatagtgaagttctttccgtcggacacgactccagcgtatgccttttcgctgtaatatagaagaagtccggctgtgttacccttgcctacgttgacttccacctgtgtttcgtaattcttgtcttcggcggtggccagcagtaagcgggcatcggaaggggtacttcctttcgcatctatccataaggtctgtttcttgaagctgagcgactgaggggcatatcctttccagaaagtccattggagtcccggttccggtccttcgaagtcatccgagaggctgagtccgtgtttgatggacggatcggtcttgatgggagtggcggtggatttggtacgataccatccatcggcggtccattcaatcggttcgatgagggtggagcgtcccagggtgtgatagcctttggcataggcatgatatacgatccaccagttgccgttcacatcgtcgatcagtgtgccgtgtcctttcgaccaccagttgtcatgggcactataggtatgcactaccggattatagggagaattttcccacggtccggtgacactcttcgaacgggcggcaactgccatgtggcttgttgccggaccggccgttcctccctgtgcggaagtcaggtaataataaccattatggtaattcagcttcggcgattccagacacatacattccgtttcccagtgattgggatatcgccagccttcgtacactttctgtttttggccgatggtggccagtccgtcgtccgtcagtcggatgacttctcctttgtcaacatataaatatctgttcccctcctgatcggctatgtgtccggggtcgatgccactcactttcaggtcgatgggtttgctccacgggcccttgatgtcatttgcccagatcacccagtttgttcctttggccggataatagatgtagtattttcctttgtacttcaataagtcgggcgccattgcagagccttcgtattcgggcattacgcgacagacgggttcccagttcatcaagtcacgggagtgccagatgagaaatccgggagcgtagtaaaaaggagaatgagtcatgtaataatcctcaccatcgcgcatgacagaagggtccggatagtcacccgataaaacgactttcgggtattcttgcgaataggcctgtactgttgcacagacaagcaaaatgaacaacaggagttttttcatggtatttatttatgggatattagatggtgtatctgatggctttacatcttgtcgggctttccgtaggccttgtacaagcgtttcagttccttgtcagtaatcggcattacggtgccgtggcgcggatggaagtccatgctaatggcattgtctatgactttgaaattctccaaatcggtgctttccgtaaactgatacttgcctttcatatatacatcgtacatcaggatgtacttgtccgtacctatcagcgggaagatgccggcaccttctacagcttctttcgtctgttgcttataatcttccgattctgtccattgtccggaagtcagggaggcggtggttgcttttttaattccattgccgtctccttccgttttatagaacaggtggtaaagtccgtctttataaatgatgtctccgtcaatacaggatttgccattcttcgggaggaacaaagttttgggttctccttctatatcggtgaaatctttgttagcgtatgcgtaataaataatgtccggaccattaccatgctgcattgaccagtagaccatgtatttcttcgcttctttatcataaatagtttgcggtgcccatacccgcttcaaatcttcctgattcgggtatttcttctggatattcacgatgttggaggtccagttgacgagatctttcgatttcaacagtaccatggcacggttggaactccatccattgccggagaccatgtcagttacgaccatgtaaaatgtctttccgtcttcacaacgaagaatgtgcgggtcacgcactccacccgtagaactgatttcacgggaatcgatgaccggttggtttccgtttaatgcatagtagttgtatccatcggggctgacagccatccggatggcttcctcactcatcctgtttccggtgaaatagacaaacaggtaggcagattgctggctgtatcctgtcagcactcctactaaaaggagtgccaggagtaaagtatattttttcatattcatttgagagtaaatgcttatttataaagtgaatgctttattatcaaaaggccgatattggcttattattggtttaatacttgaaatcagacggtttcacatagacgcggtattcacgaatcatgcccggaaagtccttttcggcacggggcagataacggaagcccgtcactgtttccactttgctcaggtcgattaccagttggtggggataagcgacattgtcaacagtcatccagaaagtggattcctgcaagtcgaatatcttatccgccgtacggtttccgctacgtgtctcttcgctatcggcataacggattttccaatgttcgcgggatacgggtttgccgtcggctcccagcacatcgaactctgcaatagcggcaatattgttattggcttgcggagagagtgcttccagacagaagaaacgtcctttcaccggagcggcgaaacgtacttcctgccagccgttgcccggagtgaaggctccttcgtgcgcaaccttttctcctgtcagcttcaacttttctccatccttgcggtgtgtttccggcgctttctcgcggagtacgtcgaggatcggtttcttcagacctttgattgatgatttcgtcggacctttcaggtcgaggacgaggatttcattctcgccttctttcagccagcagcccggtatgaaaagtgtctgctggggaccgatttcccagaaacgtcccatcgcatgaccgttcacccataccatacctttgccccatgtgctcatgtcgaggaaagtgtcgcctactttatcgagtttgaaagatgaccgatagtaagcaggcataatcggtaatattttcgtatccttgtagttcttgttcttgataaatgagtagtctacggggaagttatatacagtccagttcttcagttctttcacctgattgcccgaaaggagttctaccttttcggtgattcccttccggtcgtggatggacttatcaaagttgacacgtcccattgcctctaccagaatatccagttgcgtacctttcttcaaggccggcaaggtagtggtaaattctcctttgcggcggtcgagacgggccagcagcttgccatcagcgtagatttgtgcccagtcgtgcacttcggtgattttcaatgtagtgcctgaggttactgcttcgggcaatgtggtacggtacaggattgttccccacccttggttgaattgctccatcggctggatatccaccgactgcttggcatccggcaagttggagaaaagcggagctactttggtaaaatgaaattcgggtacttcaatgaccggcattgcggcagggacttccggcagtgcttcaccggcaggaagatacgttttcagcaggtcacggaggagatagtatttctctgtcgtccatccggcttcgctgatcggggcatcgtagtcgtaagaactgcacatagcggagtaggcaggattgttggcaccaccccaatgtccgaaagtcgttcctccgtgagtcatataaaggctgaaggagatgttgcggtcgagcatttctttgatgccctgtaccatatctttggcaggacgtgtttcatgtttccgtccccagtggtcgaaccatccgctccagaactcgctgcacatcaacggagtttccggacgaagttctttcagtttcttgaattgctggtctatattggcgcctgttccgaagttgatggtccagatcaggtcgtcgagtgcattccgtgtaaagttactgctccagtcgcattggaagagaggtacatcggtaaaaccggattcgcgcaccaagtcgcgtacggcagaaacataaggcttgtcagtgccgtaagaaccgtattcgttctccacctgcaccatgataatatttccgcccttatttacctgtagcggcgccagttgcttaccgacttctttcatgaagatgcctacccgttccatataataaggatcgagcgtgcgcagtgccacatctttcttcttcagcaaccaccagggcaggccgcccatttcccattccgcacacacatacggaccggggcggacgatgacatacattccgtgtttctgagcggcacgacagaaggcagcgatatcattctgacctgtaaagtcaaacttgccttcttcctgttcgtgtatattccagaagatataaatacaaatagtgttcattcccaacgccttacacatctcaatacgatgatcccaataggcttgcggaatacgggtatagtgcagttcggcagcttttactacgaacggcttcccgtccagcaagaaagtattcttgcctgcctcaaacttacgggcagtagtctgcgcctctgcactactgaaaaagatgactgtaaaaagtactagtaaagcaataaatctgtgtctcatggcttttatctcaatatagaattataattatatatagtatacggcaaagataggcgattcacctaaaccgcaggtaccaattatcattcaaaaaaggttagaaataaagcaaaatcccctgagacagattatttttaaaggaaatacgaccttttgttgacaggttacttgtgtctgtacccgcccctccggtcgatttcctttatagtatgaatgtttttctttcttgtgttttttcttccatttagaagagttttcttctcctcagagctgttttataatccagccccgatgaatcaattatcttcttcgtctttaaacatttgtttaattagatcaatattatcatcataatcattacccgataaagtgatgacatctgccaaacctacaatattcgaatctgaatcataagtggtcagcaaacagtacatttcacgtcctgtggcgtcttcttcaatatgaagttgtaccggttcacttcttcctccgggaaggtctgccagatattcaaagttcctggataagaaagcttccactatcttcgcagggtttgtctcatcacgcttaaacttcttgactcccaaactcttgacttttcctccactttgaaagttgtatatatcaaagttattcagataggcagctatcaggcaaaccagtgtcatgatgattccggctgtacgcaccaaccagcctgccaatggaagcaaaccgggaaaaatagccagaacggctcctaccacggccaaacctaaatataacacaggtttcagattgttctttcttttttcaaatttagtcgggttggcggcataatactcgctgatgtaactgtagtacttgttgttcttttgttccataattatgtgtttttgtgattaaactatcttgatcaatttaccatttgatttgcacccaagggctcttaggattagacaacagatcgtctgccattcccttcattcctaaattgtgagcattggtccctccccagatagccctgccaataacataactcatcgccatatcgtgccatgatgtgaaagaagaatgagccagttcatacgccttgtcgatataattccacgcttccatttctgagatatatttcatatcgcagcaagcacgggcaacaaaattaattctgccggcatcccagccaatcactccatagcgggctatatcttctttagaagtaatcacttcataagctatcaactcctcatagacctctttcaaattttgcagttgcccgacagctttttcataatcttcctgactctccatgttctgctggaaaatatcgtcttgcgcattttcatcgtcaagcaaaaaagcctcataaacaaacggaaagtagtaatcgtaacctttccggcacaaatcatccaatgtttcgcgggcatcatgagcattatttattccccaccattcaccgagaatagtaggcaacttatctttgatatccaacgagagagtgttcagatatccgccttgctgcaaggcatacaatgaacctatagacagttttttatactgttctacggataattttgattttgatttaaaacgaggcccccgaaaagctcttataatagtacggacaaatggccataccttcatataaagaaaagaaaggaccattactccgcctacgacccaaggcatccaactcatgtctgtcataaatagtgtttttgttttattgttaatactaattcaatcttaattcctctgccactttgcaggacaggctgatatcattatatatgtcctcaagcagcttcccatcattcaacgcacttggacgcacacataaaaaaccggaaggcatcacggcggcatagtagaaagtacctctgctgaacgaaagcatgatatcacatccgaaagtctggcgcagcgccgtcatatgacgcatcatcgcaggagtgagcaacatacgtgcttctacttcatcatcggcataaacggcaaaatagttctcaaactcctgatcttccagttgcagcagtcgggcactatagcgcttcttcaacccctggatattcttcgccagatatccgatcttttgttccaggtgatcgggcaatatgataatatttcctttgaatcgcttgtctatcttacaccagccaaacataccccgaaaattgtgcggactgctatccagccgcgaggcaaacagcggacgaagcacaaaacggtagatcatgacaaaatatcccaatacaggattgtactgcaacttattcaacagcccgtaagacacaccgatatccgccacgtgcaaagagtgctcgccgtgcggaaactgaatatatccatatgtattggctgccagtgccggatcagaaaaagaggcggaaaagagtttgctgtctctcaatatccggctgtctacctgagaggaagccgagaaataaacggtaggaaacagagtagacataatgtgctgcatagcttccgactcccgttcctgaaagttagtcatacagcgggtgaaaacgaagttgaccactataaatccaatgaatacaggtattatatactgcgtgaactgcatatagttctcaagacctatataagaaacaagcgcaccgccaaacaacacaaacataaaccagcagaatacaaaaagataaactgcaatacttcctgttcgtaccacctttctccagccatttacccgtaaaagctccgaacgaagctgttctgataatttcttaaaatcaattgtgtccatattcgtattatctgagaagttcggcgacatttacattctgttgttccggttcgggaatatcaatcagttcttcctgatgatgaccttgctgacgggcaacaacggaagaaggaaacatctcgatggtattattgtagtctgttactgccgcattataggtgcgccggatggcttgcagttgcagttccatgtcctcaatactgttttgcaggcgatggaattgttcattcgctttcagttcagggtaattctcgaccgacaactgtaatttggttaacagaccggacaattcattgccactttttatttgttcggcttcctgtgaaggttggaaagaatgtgatcgaagttccgtaatgcgggtaagaatttcattttcatgacccatatatgacttaacggcggccaccaaattaggtatcatgtcatttcgctgctttaatgccacgcaaataccgctacgacattgcttcaccctgtttcgcttagcgatcaaattgttgactgccccaatataccaaagtgcgattagcagtataagtcccgatccaaaatatataattcccatgcttttacttttgtgtgtatatcagttttcaatagttatatcctattcaattttgacacaggcaaaagtaaacagcatcccacaaattagcaaacaaagagggggtataaatacaggtaagcaaaaaccagataatacgttaattaataaatcattagttaggcagaagacagggtatagcagggtatatttataaaattcagagggtaatattacagtaatggtcaggagatgatgtccattttatgaccatcatctcctgaccattacttaagtctattcaaagtcagtgtctacaatccgctgaaatcgactccctcaaataccagtgaagggatacgccaggaggagttcagacgcgggtcgtttccggttgcaaccaacgagttccacaaggtaatcagattgccggtaacattcatctcggataccggttgcgtcagttttccattctcaatcaggaaaccttcgatgccataagagaaatctccggtcgaactgttgttgttaccaccattaaagcccgtaacgaggatacctttttccactccggcaatcagtccatccagattcttatctcccgtttccatgaccagaatagatgaaccgctgatagtcggatcgactcccatcttcttagcattgtaggtatcaatgaaataggtattcagtactcccttgtcaaagatggagcgacgttccgtagcaataccttcgttgtcgaaatagcgggcgccggaagctttcaccaaatgaggttcgtccgtcaaagtcagccggtcactagctatcttttcattcaatttatttaataagaatgagtttttctgttgcaaagccgagccgttcagcgcactgatcatcggacttagcaaacggctggaattcatcggatcgaccaccatcgtatatttgccggactgtactttcttttgtcccagtttgcgtaatacacgttccagcgctttctgaccgattcctttcttaatcagatcgttcatataaagcgacgactcataccaataagcagaaggacgcgcctcgccttcccctctgatcgtgatgtcggcagaaagtgagtaccacgtacttttggtttctccttcgaaaccattgctgatcaggcggtaagcaaagtcctcgccatcgccataggaagaaccgacagagatgatccgttcgtccttgcctagtgcttcttccgctacggctttcgccatctctattttatcgtccggatttaaggatgcgaacttggcatcatatagctttaagtccggtttcccacctttatagtaacgggaagggtccgccaatacacgcgcctcatctttagccagatagcgtgtagagtctattccgtttttgataaatgtttcgagctctttccggttcaggcggttggtagagatactaccataacgtccgtccacatatagggaaaggcttaatccgccttccgatgcctgttgcaatctgtccatcttcgcatcgcgcagttcgaaagaagtgttcgaagaagagtataaaaggacttttgctgcctggcagccattcttcaaggcgtagtccatcgcccactgtgccagtttcttattttcgtctgtaatcataggttcgtctttttaaagtaagcatttacttctagttctctccaccgacagtcagtttgctaaccagggctgaaggcataccgcaagtcaccggacaggattgtccgtcttttccgcaagtccatgtaccgttgtcgatcttcgcattggtagctaccatcgtgatatccgccaaagctttcggaccgttaccgataatattaatgtccttgatcggttgcgtcagtttaccgtcttcgatcatgtagcccgacttcacaaagaatgtaaagtctccggcgccgatctgtacctgaccgttcgtaaagttatctacaaagattcccttctttacagaagaaatgatatccgattcactcacatttccggcttccatatatgtagcacgcatacggggtatcggcatattgcggaacgattcgcgacgtccgttgccggttggttccactccgtagtgctttgcactgatacggtcgtgcagataactagtcagtactccgtctttaatcagataagttttctgtccttcggcaccttcatcgtcgaagttcaccgaaccccgattgaacggaatcgtaccgtcatccaccacgttgatatgttcgttgcagactttcttattcaactgatcggcaaatatggaaacattcttccggttgaagtccgcctcaaaagtatgtccgatagcctcgtgaagcaagatacccgatcctccggcccccatgacaacaggcatttcaccgcctttgggtttgatagccttgaacagaagagaagtctggtctaccgcttcgcgggcgattacgtccactacctcgtccgacaagaaatcgaatcctctgcggtaagcacgggcagcgtagccgttctccgtctttccgtcttcttccatgatgcacacggcacccagcgtcaccatcggacggtaatcgtagaacatcactccctccgaattgcagaagaagatatgcgaagtggtatcgctctgacttgcctgtactttatgtacccgtttgtccaaagcgaaaatccggtcgttcagtttttgcagataaggcatcttatctttcaggctgacttcctcccacggggaagcaacggtataatagttcttcttcagttccttttcggtgagattcagcggtttgttgcctttgttggcagaagcgatgcgagcggcagtacgggcagctttcagcatatcctccacagtaatattctccacgtaggcatagccactctggtctccaatcagtacacggactccgactccatagtcaatattcgaatagctgttgttcactgcaccatccatcaggcggatgctgttggttatcgtgtgttcaaagaagaggtcggcatagtcgcctcctttctccaatgctgcggcaagcaccttcttcaagtctgcctcgcttactccgaaatgattcatagccaaagcaactgctgctttcttgtcagctccttcgccgcccaatgcacccggggtagtcagagccatagcagaacctgtcgccaatgatccgagtagagctatacctccggtttttagaaaatttcgtctgtccatgttcacttatatttagtttcagttttcttttgtcagcagactttccagttcttcggcattcagacgaagatagaattgtccgcgataagctacagaaatagctcctgtctcttcggagacgatgatggcgtgcgcatccgatttctgcgagatgcccatagccgcacggtgacgcaaacccagttctttcgggatgttcaggtcgtgagagactggcaggatacagcctgcggctttgatccgttttttgctgataaccattgccccgtcgtgcagaggactgttcttaaaaaatatattctcaatcagacgctggctgatagccgcatctataatttctcccgtacggaccacttcgtccagcggagtggtatgctcgatcacgatcaatgcgcctactttctgctttcccatgctcaggcaagccattaccaccggcatgatatcatcatgtttcaaggcttctttcctcgccccgctgaaaaaatgcgccaatgcactgacatgccgatgcgagcccagcgtcaagaggaaacgacgaatctcatcctgaaaaaggacgatcaaagcaatcacacccacattcatcaaggtatcgaatatggagcccagcagtttcatctccagaatctgagtgaccaccagccaaatcaggataaaaaccagaatgccggtaaaaaccttgatagagccggaggccttcatcagtttgtaggtgtagtacaacagaagggcgaccagcagtacatcgataaaatcttttatgccaacgtcaaaaaacacggtacttattacttattacaagttattaattcacaaacgacaagagagtatcaccaacggataatgccattctatcatttgccatattcactctcagttctcagtttatccacaatccggacggcttccaccgcttcgcgcacgtcatgcacccgaagaatgttcgctcctttcattaacgcaacggtatccagtacggttgttccattcaatgaatcctgcggagttcctcccaatagtttataaatcattgatttccgggaaacaccgactaacagtggaagttcgaaaatgctgaactcttccaggtgagccatcaactcataattatgctccagtgtcttcccaaaaccaaaacccggatcgagtataatgtctttcagacccaattcacgaagttgttgcaccttacaagcaaagtacatgaacacttccttcatcaaattatcataatggggttctttctgcatattttggggagttccctgcatgtgcatcatgatataaggcactcccaggcgggccacagtctcaaacatccggttgtccatctcaccggcagcgatatcattgacgatagctacgccatactcctccacacactgttcggctacatccgcccggaaagtatcgaccgaaacgatagcatccggatgattccggtttacgatctccagtccggtacgtaagcggttcatttcttcttcggcggtgatgtgttcggcgttcgggcgcgaggagtaagctccgatatcaatgatagaggctccttcatcgatgatctgccgtgccctcgctgcaatttcctcctgcgtctgcatccggctgccggaataaaaagaatcgggtgtcacattgagaatacccatcacttgcggagtagcaagatcgagcagacgtcctttcacatttatataagttggagagatcaatttcattcttgattatattccagttagactgttgcaaatgtagataaaaaaagcaagtattcgtattaaaattaggaaataaacgtatatttgcaatcaatagcaatcaatagaactaccgaaaacgaataccatgagccgattgtcccgaattatcttaggataccttgtctcttttttgttcatcgttattcctgcaaaagcccagaaagaagctgaagtttataacgttgattcctctttgtatgcctactatcagcgttgccaggaacatttgctggaaccggtcgtgctgagtatgtccgatacgctgttccgtatggctagcggacaaaacgaccagcggatgcaggcggtagctctctccacccggctggactattattattaccaggccaataatgaagacagcatcattttttataccaataaggtaaaacaattcgctaaagaaatacagcagtccaagtactactatttcgcctgggccaaccggctgatcctatattacctgaaaaccggaaggagtaacatcgccctctatgaagccgaaaaagtgctgaaagaggcacaagccgaggacaacaagaccggactcatgtactgctacaacatcatgtcgcagatttacacaatcaagaactttgatgtcatggcgtccgaatggcgcgtgaaagaaatcgaactgaccgaaaaatacaaattagaaaactataacatcagtaatacttacgctcaacttgccaattactacattacgcatcatcagccggaaccagcgctggaagcactggaaaaagcagtaaaaacagccaactccgccagccataaaatactggcaaagctgacatacgtagagtattacagtgaatttaaagatttctcagcagcggagaagatgctgaaagaatgcagggaactgttcgaccaggacaaaaggctggactcactcaaaaaaaggttttaccgcacagaggctttctactaccagcgcagcaaacagttcgtcaaggcactggaagctgtcgagaagcagaaaaccgaagagcaacggctgaatgagtacgccatgagcagcggacaataccgcctcaaaggagaaatctacagacagatgggcagaccggatgaagcggtgaaatttctgaaaaaatatattgaagtagacgattctttgaaaatagccaatgaacaactggcgagtagcgaatatgccacgctgctaaatgtagaaaagctcaatgcggagaaaaaggaattaatgcttcggacaaaagaaaaggagttgagcaataaaacgacgctgattttttcattgatcatcctgttagccatcctcttcttgttcttatatcgggaaagccgtctgaaccggaggctgaaggcctcggaaagtgaattaagaaataagaacgaagaactgacttattcgagagaagaactgcgcaaagccagagatcaggcagaagcgaccagccagatgaaaacgacttttattcagagtatgtctcacgaaatacggacaccgctcaattcgatcataggcttctcacaagtattaagtgaccactacggcaatgaggaaacgaaagaattcgtcaacatcatcaaagccaacacggacgatctgcttcgactcgtgaccgatgtgctcgcattgtcggagctcgaccaatataacaagctccctacaaatatccaaacggatatcaatatgatctgccagctatctatcgaagtagctaaaatgcagaaacaagacacagtcgaattccttttcaaaccggaaagggaaaaactaatcatactcagcaatccggaacgcatttcgcagttacttgccaatctggcacacaatgcgatcaaattcacgactcatggcagcatcgaactgacttattcggtattggaagcagaaaagaaactcgagatcagcgttaccgacaccggtataggaatccctaaggagaaacaggaaaaagtattcgaacgcttctacaaaatgaattccttctcacagggcacgggcctcggactgtcgatcagccggacgattgccgaaaagttaggaggtagcctccacatcgattcatcctatacggacgggtgccggatggtgctgactcttcctttggtatatgctgagtaaaaaacgcttctgaccgataccaaatccgaaagaatagcctatctttgcaacatttaaaaataaaagctcaggctatgaaactttctgctctttaccagatatttctggattgccaattagtgacgaccgatagtcggaactgtcctgaaggatcactgtttatcgctctgaaaggcgagtcattcaatggaaacgcttttgccggaaaagcattggaaaccggttgcgcctatgctgtcatcgacgaatccgaatacgcgatagaaggcgatcaacgatatatactcgtagacgactgcctgcaaacattgcagcagcttgccaattaccaccgccgccagctgggtacacgagtaatcggtatcactggtaccaacggcaagacgactacgaaggaactgatctccgccgtactctctcagagccacaacattctttatacgctaggtaatctgaacaaccacatcggcgtgccctctaccctgctccgcctgaaaacggaacacgaccttgccgtcatcgagatgggcgccaatcatccgggagaaatcaaattcctcagcgaaatcgcagagccggactgcggtatcatcaccaatgtaggcaaagcccatttggaaggcttcggttctttcgaaggtgtgataaaaaccaaaggagaactttatgactttctccgtaagaaagaaggttctaccgtctttatccatcacgacaatgcttatctgatgaacattgccgaaggactgaacctgatcccttacggcaccgaagatgacctttacgtaaacggacgaatcaccggcaactccccttacctcactttcgaatggaaagcgggcaaggatggtaaatcctatcaggttcagacgcaactgatcggagaatacaacttccccaatgcactggctgccatcaccatcggccgcttcttcggagtggaagatgcaaagatcaacgaagccttagccggatatacaccacagaacaaccgctcgcaactaaagaaaacggacgataacacactgatcatcgacgcatacaacgccaatccgaccagcatgatggctgccttacagaacttccgcaacatggaagttcctcacaaaatgctcatccttggtgatatgcgcgaactgggtgccgaaagcgctgccgaacatcagaagatagcagactacctcaaagaatgcgcgttcgaaaaagtatggctggtaggagatcagtttgcagcagcagagcactccttccaaacctatcccaacgtacaggaagtaataaaggaactggaagccgacaagccgaaaggatacactatcctgatcaaagggtccaacggaattaagctcagttcggttgtagattatctataatatcgctgttaatttctcaaagtattctcatgcctttgagaaaaaattctcaccacgatgagaaaaaatactcatgcctatgagaatattttctcactgcaatgagaattttttctcataggcatgagtatgattatgcattactatagtcttctattcccttctcatcattcgcggacgaaccacataataagccactaaactggcaaggatggcacccaccgagttggcggcaaagtccagccagtctcctccccgataagtcgtgcaatattcttgcagcaattccacacagccgctgaacagtatgggacagaggaatgcccctacccatgcgtgccataacggtgcgtcatcacgacgatgcgcccgcagaaattccagccataacatacctgacataccaaagtacatacagatgtgaactaatttatctaagttagggatttcattcaagtccgttttaggaggtttgaagaaagacagataaatcacagttaagatgataaaaagtgaaataggatatttcttaatataagatagcatatctaaataaaattacgattccggtacaaatataactatcattttctatatttgcattttaatacgtacattttataacgatttgtaagacaaaacaagatttatgacgaaaattgatagagcgaacttcggaagtaaattaggcgtaatacttgcttccgccggctcggcagtaggattgggaaacatctggagatttccctatgaaacgggtaatcacggtggcgcagcctttatactgatctatttaggatgcgtttttcttttgggacttcccattttgattgccgaattcctgatcggacgccgttcgagggcaaatacagcgggagcctatcagaaattagctcccggcactcattggcgctgggtgggacgcatgggagtcctcgcagcttttctgattctcagttattattccgtagtggcaggatggacgctggagtatgtgtatgaagctcttacgaacggctttacgggtaagactcccacagaattcatctcttccttccagcagttctccagcagtccgtggcgaccggtcttgtggttggttctgtttctgttggttactcattttattattgtcaaaggcgtggagaaaggtatcgagaaatcttccaagatcatgatgccgactctgttcattattatattgatacttgtaatctgttcggttaccctgccgggagctggtgcgggtatcgagtttctgctgaaaccggatttcagcaaggtggacggaaatgtatttctgagtgcgatgggacaggctttcttctcccttagcctggggatgggatgtctctgcacctacgcttcttatttcagcaaagaaaccaatctgaccaagacagcattcagcgtagggattatagatacatttgtggcagtattggcaggcttcattatctttccggccgcattttctgtaggcatacaaccggatgcgggtccgagccttatctttatcacactgcccaatgtattccagcaggcattcagcggagtaccgatattggcctatatcttctccgtcatgttctacgtattgcttgccatggcagcactgacttccaccatttccctgcacgaagtggtcaccgcttatctgcacgaagaattcaacttcacacgcggcaaggcagccagactggtgaccggaggatgtatcttcttaggtatcctttgttctttgtcgctcggagtgatgaaaggattcaccatcttcggattgggaatctttgacttattcgactttgtcacggctaagatcatgctgacactcggcggtctgtgcatttccatctttaccggatggtatctcgacaagaaaatcgtctggtcggagatcaccaatgacggttcgctgaaagttcccgtatacaaactgatcatctttatattaagatatattgcaccgattgccatctctctgatctttatcaatgagttgggacttatcaaactataatgtggaaagactttttttattttactaaaaccgaacgacaaggcattatcgtccttgtcgttcttgttataggggtatacacaatccccgcactcttgcaggctttctccggaccggagaaaaccgacccgactgaacaggcgaaatccgaaaaggaatataatgaatttatctcttccataaaagaagcaaagcaggacaagaaatatccagtttacagaggcaggtattcatcgcccgcctatccgaaaaaagaaatcagaccggcagcgttcgatccgaataccgccgactccgccactttcctcagtctcggcttgcctacctggatggcgggcaatattctgcgataccgcagaaagcaaggcagattccgacgtccggaagactttcggaaaatatacgggctgacggaagaacaataccggactcttcaaccgtatatacgcattgccgaaacaccggtccttcaagataccagccggatattagtagtacaagcgactgcaccatatgatactttaatgaaatacccgccgggcactatcatcgaccttaatcaggcggataccaccgaacttaaaaagattccggggatcggaagccggattgcccgatcgattgtaaaccatcgccggttattgggaggattctatcagatagaacagttaggggagattcggttaaaagcggaaaagctccgttcgtggttctccgtggatgctggaaagattcaccggatcaacatcaataaggcaagtgtagagcgaatgatgcatcatccgtacatcagctattatcaagccaaggtcattgcagagtaccggaagaagaaggggaaagtaagagacttgaaacaactgatgctttacgaggaattcacacccgcagatttcgaacgaatggcgccttatgtttgttacgactagaatcgtatttgttgtgatatataaaaaaagatgcattcctatcacaccagacaagaatgcatcacacacaaacaaaacaaacactctactgacatcttcacagacttacgtagagaagcgactataaatatatagctaaaagattgaactcacacaatcttctagtgatttggtatccatttttagaagtttggtttccttattaatcttttttaattgtgccatccaccatatgtaccgttctatcggtgattttggccagtccttcatcatgggtaacgatgacgaaagtctgtcccaaccggtccctcaggtcgaagaacaattggtgtaaatcttctttattatgtgtatcgagacttccggaaggttcgtccgcaaggatgactgccggatggttaatcaaggcacgtgctacggccacccgttgcttctctcctcccgacagttcgttcggcttatgggaagcacggtcggtgagtcccatgaaagccagtatctccatagcacgttcgtttgcttccttagacgatactccggcgataaatgcggggatcatcacattctccaacgcggtaaactccggcagaagctgatgaaactgaaacacaaaaccgatattcttattgcggaaagcggacagttctttctccttcatccggctgactaccgttccgtcaatcgccaccgtgcccgcatccggttcgtcaagcgttcccatgatctgtaagagagtcgtttttccggctccgctaggtcctacgatactgacgatctcacctttattgatttccagatcaatgcctttcagcacctgcaaagaaccaaaactcttggttattccttctaattttatcataatagcttcttagattcgtttaatgacatattccgccagatagcagccgaagactgccggcatatagctgaccgttccgcaggtcgatttcttattccgttcgtcatccgtgagcaataccgctttcgggtccgcctgttcggtactgaatacgacgggaagtttacgctttactcccattttctgcaaacgcttccgcaccgctttgctgagtccgcagtgataggtatcccaaagatcggcaaagcaaatctgcgtaatatcgctcttcgcgcctgcgcccatgctggaaacaatctttatatgacgcttcatcgcttcataaatcagaaagcatttggggctgatcgtatcgatggcatccactatgaagtcaaacttagcagagtccaacagttcggggatgttctcgtctttcagatagacgggtaaaacggtcagttcaatatccggattgatgtctttgtagcgtgccgccaacacttccgctttcggcatccccagggtggagtgcatggcaggaagctgacggttcatattggcaggctgcacggtatccgcgtctacaatcgtcatcctgcctaccccagcccggcaaagcatttcggcagcatacgcccccacgcctcccagcccgacaaccaatacatgcgaagcacggatgcgcttcattttctcttctcccaacaggagttctgtccgttgttgccagttattttcttccatcagcttttcttaaaccatttataaaaccatttgcccaccttttcataatgctgcgattcgttgtaaccacgcgggtcggagaaagacacaatctcctgcggatcgccgaactggtcggggtacaggataatcagactgttgttggagaaatacttgctcagctgtgccggcagacgttcaaaggacggatcatacgagatagaaccccgacgggcagagatgacaacgaataaatgatcgtagttcacctgtccggtcagcagcagaaggtcgccccactcttcgagcagagaaaattcggtcggggtaccgctgaatttcttcttcaccagttgttgcagacgcatcagtgtacgttcattggcaaagaagtgcacacggcagccgagaatgcttcccatccggcagaaatgctctacccatttggaaaaaccggtttcaaattcggctttgggcggaacggcgatgatgatgcggcggagcgtattgaccggcatcaggaatttggctatcatcacttcgcggtgagtacctttcagcaggctttcggcaaggttgccaaagaaggaatcgacaatgttcgccttgcggtgcagaccgatcactacatccgtagcctcatattccttaatcgtatgtataatccccgaagcaatgttcagatcgtagcggcttaccatcgtcaccggcacatcggcggcggcggcaatcattgcggctttttcgagattccgcttgccttgcagttccttattctccgagctgttattgtcattaatcacattcagggcaatcatgccattcttctgcttggcatccttgatcaccagggcgagattcaccaggttctcaatcgtttccggattagctaccggaatcagaatctgctccatcgctttcttcgctcccttatcttcgggctgcgcatcttcgttcagtgcaaaccggcgggcggaacgttccgttaccagcgaactgatgacacaggtgaaaaggatcatcacgaccgtaccgttcagtacgtcatcattgagcagacgctctccgttttccatgataatttcgtgcccgatcagcaccgctgccagcgtagccgccgcctgtgcattactgagtccgaagatcatgctgcgttcattgggctgcatacggtaaatcttctgcgtgatccatgcggcaagccatttgctgaaagtagctaccactgtcatgactaccgccactttcaatgcttcgccccccgtaaacaggcttctgacatcgataatcataccgacaccgatcagaaagtaaggaatgaacaaggcatttcccacaaattccagacggttcatcagcggagagacatgaggaatcaagcggttcaggaccaatccggcaaggaaagctcccaaaattccttccattcctacaaactccatcagtccgcctccgaggaagaccatcgccagcacgaacacgaactgcatcacgctgtcgtcatacttccggaaaaaccagcggccgatgcgggggaaaaagaagatgataaggaaaccaaggaaggctactttcgcaacgaggaacacccagaacagaccatcgacggtgcctttaaacattccgccaataacggcaaggatgataagggcaagagtgaccgtaatggccgtaccaccgatagtaatattgacactgcgcagacgggataatccgtaacggctgataataggataagcaatcaaagtgtgagaagcatacatactggcaagcagcactgcggtaaggaaaccgtatcccagcatgctcatactgctccatatacccagcgccataggaatcaggaaagtaagcaagccgaagacaacgctcttcatccggtttttcttgaagtcctccatgtccatttcgagtccggcaaggaacatgatatagtaaagccccactttaccaaacagttcgaagctgctgtcacggtcgagcacatggaatccgtgttcgccgatcagcacaccggccaaaatcataccgataatatgaggtatatgaaggcgccccagaatcatcggagcaaagagaatgataattagcaccagaaaaaacacccaagtcggatcggttatcggtaacgctaaattgaattcaaacaggttcataggtccgtggttttaggatttctacgcaaaggaacaaaaaagttcgcagaatcacaatgcaggtattataaatctcatcctcctgtttatttaataggaataatagcaacaattgcagaaggatagttgttggagataaaaagaaaacttaactttgcatccatcccaataaaatgaacgcattatggcaaaaggaatcccttatggcatatcggacttcagcaggctgatagaccaaaattattattatgtagataaaacgcatttcattccccagatagaagaaatagcaaactaccttttccttattcgtccccgacggttcggcaagagtgtatttctcaccatgatgcgtgcctattacgatatttcacagaaagatcgttttgaagaacggttcggcaatctatggatcggtaagcaccccaccccgcttcagggaatctaccaggtgctctattttgacttttccaaagcaaacctgggacgtggaagtctggaagacaacttcaacaattattgctgcatacagttgaacgacttcttcagtacttaccgggaatactaccaaggcgagaaagaactggagcaaatcatcgcttctaccgaagccgctacaaagctgcattggctggaagccaccgcccgccgcctgggacatttgctctacctcatcattgatgaatatgacaactttacgaatgtcatcctgagtgaacaggggaaaaaccttttccgcgacctgacccatgccagcggcttctaccgggaatacttcaagcagttcaagggtatgttcgaacgcatcttcctgatgggggtaagtcctgttacgctggacgacttatccagcggatataacatagactggaatatcagtgtggacccgcacttcaatatgatgatgggattcagtgaaacagatgtacgggagatgttcgactattatcagaaagaaggtatgctgaaaggagatatagatgccatgattaatgaaatgaaaccgtggtatgacaattactgctttgccaaagccagcttgaagaccgatccgagaatgttcaattgcgacatgacactatattatttgcgtcaccgggttaatttcgacgcatctccggaagaattggtcgacaagaatatccgtacggactacagcaaattgaaaatgctggcacgcctcgaccatgagaatgtatcgggaggagaccgcatgagtacgattgaagagatagctgctaaaggagagatactggtaaacctccacacatcttttcccgcagagaagattgttgaaacagacaatttccgcagcctgctttattattatggactgcttacaatgtgcggcacacgtggagaccgtattgtgatgtgcattcctaacaattgcgtccgtgagcagtatttcggattccttcgggaatactaccagcagcgtaaggaagtattcttgcctcacttaaaagatttaattgacgacatggccttcgacggacaatggcgccctctgtttgagtacatagcccttgcctataaagaaaactccgccatccgcgatgccatcgagggagaacacaatttgcaaggtttcttcaaagcataccttgctcttgcttcttattatctggttcagccggaattggagatgaattacggatattgtgactttttcctcctgccggacaaatcccgctacccggacacggcacacagttatattctggaattaaaatacctcccgcgcaccgccaccgataaggaactggaagaacaagcggaagaaggcagagggcaactaaaacaatatagccgggataaaaaggtaacaactatcagtgaagggactgcattgcattgcattttgctccaatttaaaggatgggaactgataaaatgtgaagaagtatctccaaaatgctgattatatgataaaatgttctaattttgcagcgattaaccacattattcacatttaacaaaagaaaaagatgaaagtagctattgttggcgtaagcggagccgtaggacaggaattcctgcgcgtgctcgatgagagaaatttcccgatggacgagttagttttgttcggttctaaacgcagtgccggaacaacctatactttccgcggtaaacagatcgaggtcaaactcttacaacacaacgatgactttaaaggagtagacattgctttcacttctgccggtgcaggaacatccaaggagttcgagaaaacaatcaccaagtacggtgctgtgatgattgacaactccagcgctttccgtatggacgctgatgtacctttggtagtgcccgaagtaaatgccgcagatgcgttggagcgtccgcgtggcgtcattgccaatcctaactgtacaactatccagatggtagttgcactgaaagccatcgaacagctttctcatataaaaaccgtgcacgtatctacttatcaggctgccagcggtgccggtgctgccgctatggatgagttgtacgaacaataccgtcaggtattggccaacgagcctgtgacagtagaaaagtttgcttatcagctggcattcaacctgattccgcagattgacgtgttcactgaaaacggttataccaaagaagaaatgaagatgtataacgaaacacgcaagatcatgcactctgacgtgaaagtcagtgcaacctgcgtacgtgtccccgcacttcgtgctcactctgaaagcatttgggtggaaacagaacgtccgatctcggtagaagaagcccgcgaagcatttgccaaaggcgaaggtctcgttcttcaggacaatcccgccgaaaaggaatatccgatgccgttgttccttgcaggcaaagaccctgtgtacgtcggacgtatccgtaaggaccttacgaatgaaaacggtctgacattctggatcgttggcgatcagatcaagaaaggtgctgcactgaatgctgtacagatcgctgagtatctgatcaaggtaaagaacgtataagatacatagataaaatgaaataaaggtcggcttgctacacgacaatcgtcgcagtgcaagccgatcttctttatttgccttgaagtcaccaaggctttcctttccccatctctcctacaagattattctccaagaagtagtttcagattctgtttcgcgccttgaaacaaaaggtttcatgccttggaactaatagtttcaacctttgaaaccattggtttcaaggcgcgaaactaaaagtttcaagcgtctgaaactatctgaaacaactgtcgattgaaatgacttgaccgtaacaactgattcatttaacctgtcctttcaagctatttcaaaccatttatcggtccataatgaatgagttgtcagctattaacaactgattcctcagttattaatagctgagataccaattgttaacagttgacacatcagacattaacgttctgcaaatcaaagcataaagctaaacaaacgagattaagtccatggtgcaaagtgagagcaaccgtttgccctcacacctgccgccacagttgctaccacaccggaaaccacgatgaataaagggacacagaccgtttgttagagcatgagagcaaaactgttatcaaatcactgtggggagaaatacctatttatgggtacccgcatatcccaaaatagccattatttgcgattgtagtattaacgatataagacgaaatttgcacaaaatttgttctatgaggtttcttgcacttaaaataatgctctgcttgcttctttctttgatcgtttacagaattgaagccaatcctaacaattattctatttccggtcgtatatccgacgaaaggacgggttcgccgttgcccggcgcatccattttaatcaaaggcacctatttgtgggctgtatccgatcagaagggggaatttacgatacaaggagtacaggaaggcaagtatcaattggaaatttctttcctcggttatgttccggcaacggtcccggtgaatgtgaacaacagcatcaaaggattaaagatacaactgaaggaaaatacacttgccctgaacgacgtaatcgttaccgcacaagctccgaagagtgagctgaacaccacgctcaacatcgggagtaacgcactggaacatctgcagatatcgaatgtaagcgatatttccgcccttcttccgggaggaaagacgaaagttccggacttgaccagcaacaatattttctctctgcgcgacggaggttcgtccgcaggcaacgcggctttcggaacggcgatagaagtagacggagtacgcatcggcaacaattcttctttcggcaatatgaccggaatagatacccgcagcatctccgtggccgatatcgaatcggtagaagtcatcaccggagtaccttcggcagagtacggagacttgaacagcggtatggtcaaaatccatacgaagaaagggaaaactccgtggaatgtactgctatccatcaatccccgcacagaacaggtgtccttttccaaagggctggacctcggcaacgataaaggaatcgtcaacataagcggtgaatggaccaaggctactcaaaagctgaactcaccctatacttcttatacccgcagaggattctccgcaggttacagcaatacgttccggaaagtgctccgattcgacatcggactgaccggtaacatcggaggaatgaatacgaaggatgatcccgacgcatatacaggagaatacaccaaagtcagagacaacgttttccgtgcaaacacgtcattggcatggctgctcaacaagtcatggattaccaacctcaaactggatgcatcggtgtattacaatgataacaagtcgcatgcacatacaccttattcttatgcgtccgaacagccggcagtccacgccgaacaggaaggctatttcattgcaggcaaactgccttaccatttctttgccgatcagattgtcgattccaaagaactggattatgccgcttcgttgaagtacgaatggaaccgtcgtttcaagaacgttaccagcaatctgaaagcaggcgtgcaatggaaaggaacaggcaatgtgggcgacggagagtattatcagaatccttcgctggctcccaacggatatcgtccccgttcttactcggcttatccgtatatgcacaatgtttcgttgtatgcggaagaaagcctgtcggtacctgtcggcagcaccatgctgaggctgatggcgggattgcgttgggagaatctgttcatcagcggaacgcaatacgacaagttgaacacactgtcgccacgtttcaacgccagatggcagctgaacgaaaacatagcgattcggggcggatggggagtgaccgagaagctgccttcgtactatgtgctctatccccgacaggagtatcgggatattcagactttcggagtctcatacaataacaatgagtcggcttacgtctattacagtcagccatatactttattacacaatgagaaactacgctggcagaagaatcagaatgccgaaataggagttgacatcaacgtggcccgcacccgtatttcactggtaggatactttaaccgcacgaagatgccttataaatatacaagtacctatactccgttcgcatacaatgttctacagttgccggaaggattcgagctgtccgccaatccgcagattaccgtagacaatcagacgggcatgggatatatacgggacgatgagaacagttactggacaccgctggacgtaaaggtgaaagaccagactttcgtcaggtcaacctctcccgataacggaccggacatcacccgcagaggagcggaaatgatcatcgattttccggagatcactcctctccgtacgcagttccgtgtggatgcggcctatacatataccaaatacatagacaattccttgtcttattactaccaaaacggatggtcgcacaccagtctcgccaaccgttcctaccaatatgtaggtatatatgccaacggcgacaactcatccacaaccgccaacggcaagcgcactcactcgctggatgccaatatcacagcgatcacccgtatcccgaaagcaaggctgatcatatcctgcaaactagaagcctcgctcatcaagcggtcgcagaacctctccgaatataacggtacgtcgtatgcgttcaacgtcagcgaaaacagcaacgagaaaacaggaggcagcatctacgacggaaattcttatacggctatttatccggttgcctacctcgacctgaacaacgaggtacatcctttcaccgccgccgaagccgaaaatccggacttcgcacatctgatacgtaaatcgggcaatgcctatactttcgcagccgacggatatgatccgtatttctctgccaatatcagcattaccaaggagataggcgatcatgtttcgctgtcgttcaacgcgattaatttcacgaactcacgggcgtatgtgaaatcatacgcaaccggaaccagtgcaatctttaccccgaacttttattatggactaacctgccgcattaaactttagaaatatgaaacaacagtcaatctatatcgtactgcttttcgtcacatccttactcggaggatgtacggacctcgacaaaggcaatccttacgaagaccagctgcacaccttgcaggtgactgccgtctatccggacgaatacgcggaataccttcgggaaggcatcaccgtccaaatcgaagacatcgaccgcggcaattcctacaagacggtaaccgaccagaacggtacagcgcaattcgccctgaccaacggcatataccgcatacaaatcagtgataaagccgaccagcatatattcaacggactggcagacaaggtaaaactcgtaaacggggatgtcacactcaacgttccgctcacacactccaaagccggtgccatcattatcaaggaaatctattgcggaggatgtaccaagctgccgcaggaaggtacttatcaggctgataaatacattatcctgcacaacaatgattcccagacgcagtatctcgaccatttatgcttaggtacactcgatccttacaactcccagtccaccaacgtatgggtgacgcaggacgaagcaaccggagcaaccattttccccgatttcgctcctatcgtccagtgcatctggcaattcggcggtaacggcacttccttcccgctggcacccggtgcagatgcagtcatcgccgtcaacggcgccatagatcatgccgcccaatacccgctgtcggtcaatctgaacaaaccgggatattttgcctgctacaacaatgtttattactggaatacgatgtatcatcctgctccgggagaccagatcagccgcgaccattatctggacgtggtcatcaaactgggacaggcgaatgcctatacattctccatattttctcccgccactgtcatcttcaaggctcaggacactacgatacaggagtatgtacagcaaacaggcagtgtgatacaaaagcccggcagcacggtggatcaggtcatcaagattccgctcgactgggtgattgacggggtagaggtgtactatggcggttcgtcgagcaataaaaaacgcatttcgccttccatcgatgccggatatgtcagccaaagcgcactgtatgacggacgcagcctgcaccgtcgggtagacgaggaagcatcgaaggaggccggttatgaaatactggaagatacgaacaactcttccgccgatttttatgaaagagaacaacaatccctgcatgagtaatatgaaaggaatatatataggatgtatgctgttgtgtatagcagccgtaagctcggcacagacttacgatgttatcgaacgacgaaattcatggaataccggaacaaacgtaacgggaatcatgatggacagcgtcaccgtctcctacaccgagctgtacggcaagaacaatcacggtgacttccgcaactactacgaagccggtaaattatggagtgccggtgcagtagccaagtccatcacacacttaaagaagtattctctgatcggctcgttctcattcgaccacacttccggcaaggatatgagcggctccatgttcattcatcccggattttatccggtagacctgctggagtttacccccggccgaaaggatttgcaaacttatgcgtttatgggaggtatagcagcagatgccggcaccaactggcgcatcggcggaaagatcgatttcacctctgccaattactccaaacgcaaggacttgcggcataccaactacagactggacttaaaagtcgctcccggcatcatgtatcattcggaccattatgcgatcggattctcttatattttcagcaaaaacagcgaatccgtttcagcagaagagatcggaacagccgctacaccttattacgcattccttgataaaggactgatgtacggtgcctacgaagcatggtcgggaagcggagtccatctgagcgaatcgggtatcaacggattccccatcaaggaactgtctcacggagcagcagttcaggctcaatggggatcgctttacggagatttggagtatctgcattcttccggtaccgccggagagaaagaggttatctggtttaagtttccggcacaccggattacatcgcatctgagataccgtttcgccaaaggcagtaccgaacatttcctgcggatcaacctctcatggtcacgccagacaaatgacgagaatgtattgggacaggagatatccaacggaatcacgactacccatgtttacggttccaaccggattttcgaaagaaaggctttatccgttcagcccgaatatgagttgatcgctcctaaaggagaattgcgtgtcggagccgagatttcgtcattcaaaagcatgactacccaaatgtacccttatgtcgcgtcacagacaatgacttgtggacgggtttacgcatccggtgtacttcatgccgaaaggttcgatgtgaaagctgccgcaagtttctccataggagacttcacggagaagagcaggactactgaaacgacaggcgaaccgggtgatcctccataccgcctgacagattattaccatctacagaacgagtatgcaactgccccacgggcgacagtgaacgtcggattacgctatcactttcatcgggggatttatgccgaaattcagggcggatatacgcacggtttcaaccttgaatatatagcaggttcgagccgttggaatgagacgattaagttaggttatacattttaaaattattcatttacataatataaaactatcaaatgatgaaaaaggggatattatttgtgctggcagcagcatttctggcatcttgccagcaggaggaaaacgagggagtagcatctgtggaccgggtgaccatcactcctattatcacacgtgccacagaggttaatttcgaagatcaggatcagatcggattgagtgtcactaaagaagacggcactgtatatgccaccaacgagcttatgactttcaatgacggagctttcgccggaagtctgaaatggtatcccgaaggagcagacaagtcttcattcgtggcttactatccttacagcgcaaccggtgtaccgacttcattcaccgtgcatgccgaccagaccaccaactacggaatctccgactttatggcggcaagcaaatccgacgtacttccttcggtgaactccatcagcatgatcttcaagcacatgctgaccaaactggttattaatgtgacaaacgaaacgaatttggatatttcatctatagtgctcaaaggctctgttcctactgccaatatcaatttggcaaccatgaagacaaccgtaaacgagagcgccgccgccacagacatcacagcacaacaagtgacaaagaataagacttttcgtgccattgtagtcccacagacggctgcgttcactcttgcagtaacaacttcagataacaatacattgatgcaaaagctcgtatccacagatttagttcaaggcggacaatacagtgtcaatatacgtgtattacccgataatatcatcgttacactcagtggtgagatcgagaactggacagacgagggagagatcaagggagatgagccggaagttccttttgaagagcatgacggatatttcatctacgacggcattacctacaatacggtaactctctccaacggaacaacatggatggcggaaccattacgctatgtaccggatggatatactccgtcaagtgatccggctgcagattctcacatctggtatccgtacgaattggttacagttgacggtacacttactgcaaaagcattgcaggacgcaacttctatcaagcagtacggttatctctacgacatccatgccgcacttagcggcaaagcagttactccggaaaactgctacgactttgaaggagcacagggcatctgtccgaagggatggcacatcccgactcgcgccgaatatttcagccttgtaggtaattcgaccaaagatgcggacggcaatagtttggaaaacggaaaagacgctcttttctatgacacagcatatgacggtggtaaaatcccgacactcaacgaggctaaatttaattatcaattctcgggagtacgtatgtcaaccggttattcagccgtccccaaatatcaggcaacggcaataaccagcagcaacagtacggtaaccgaatggtttggaaaacccagtatgagttattacatgacttcaactgcatataagcctatttatagtacaagcaccggcgacctgaccaatattcagttcttcggactaatgagcacattctcaatggcgaagtatccggaaggcagattgtctctgagttatatcagtgtacttagtggtcaaacagttcgttgtgtaaagaaccagaactaaaagccatttgcaagttcataaaaaagaatataaactacataaaaacaaaaagtaacaatgaaaacaaaaaagctaagcatcgcaatcgctctactggcggttgccgttatcggaacctcttgtggaaacaaacagcagaaaagttcctcggacacaacaacagaacagaccacttcgtctgctttagaaattgactctcttcttgcaaatgcagaaaaccttgcaggaaaagaagtaaccatcgaaggcgtttgcacacatacctgcaagcatggcgccaagaaaatcttcctgatgggcagtgacgacacacaagtgatccgcgtagaagccggcaccttgggagcattcgacccgaaatgtgtgaactccatcgtccgcgtcaccggaacactgaaagaacaacgcattgacgaagcctacctccaaaactgggaagcacaactcaaagcgcaagctgccgaaaaacacggaaccggtgaagccggctgtgacacagagaagaaagcacgcggcgagacagccaacacgcccgaagcccgtatcgccgacttccgcgcgaagatagccgaccgaaaagcaagcagcggcaaagagtatctgtctttctatttcatggaagctaattcgtatgaagtggagtagcagcatccgtaaatggagtaggctgatacaccgtgatttatcctttttctttgccggaatggtcttgatttatgccatttccggcattgtgatgaatcaccgtgacaccatcaacccgaacttctccatcgaacggaaagaatataagattgccgaaaaactgccgggcaaagagggaatgaaaagggaaaatgtactgactctgctgcaaccattgggagaggaaggtaactataccaagcactatttcccgaaagcggacatcatgaaagtgttcttgaaaggcgggtccaacttgcaggtaaacgtccgtacgggagaggcagtctacgaatctgtcacccgccgcccgctcatcggagcaatggcacgcctgcactacaaccccggacaatggtggacttactttgcggatattttcgcagtcggcctcatcatcatcaccctttccggagtcatcatgctgaaaggcaacaaaggtattatcggcagaggaggaatagaaatgattgtcggaatcgtgattcccatcctttttcttctcttcttttgaacagaataactgataaaataaaatggaacaaatcatagaatgtaacaacctgacgcactactacggcaaacggttgatttacgaaaatcttagtttcacagtccccaaaggccgcatcctcggactactgggcaagaatggtacgggcaagaccacgaccatcaacatcctgagcggatatctgaaaccacgttccggagaatgccgtatcttcggacaagagatacagacgatggctccggcattgcgccgcaacatcgggctgctgatagaagggcacgtacagtatcaattcatgagcatcacccagattgagaagttctacgcagccttttaccccaatcaatggaaaaaagaggcttattatgaactgatgaacaaactgaaagtagctaccggacagcgcatctcccgtatgtcttgcggacaacgttcacaagtagcactcggactgattctggcacagaatcccgagcttcttgtattagacgacttctccctcggtctcgaccccggttatcgccgcctgtttgtagactatctccgcgattatgcacgttccgaaggcaagactgtctttctgacttcgcatatcattcaggatatggaacgactggtagacgactgtatcataatggactacggaaagatactgattcagaagccaattgacgaattactgaaagaaggacgccgctatacctgtactgttcccgaaggttacgaactgcccgcatccgatgatttctatcatccttccgtgatgcggaatacactggaaacattctccttcctccccctcacagaggcggaagcaaaactgaaatccatgtcagtaccctatacggacctgcatagcgaacatgtgaatctggaagatgccttcatcggtctgaccggcaaatactgattcaataaaataattaaagattaaaaagtaaattagaagtctcatgtacgctatattttataaagaatggatcaagacacggtggtattttctgcttgccgtagtcactacactcggttttacaggctactgtatgcttcgcatcaaccgggtgatagaaatgaaaggcgccgcgcatgtatgggaagtcatgatgcagcgggatgccatattcatcgatatgttacaatacatccccctgattgccggagtgctgatggccatcgtgcagtttgttcccgagatgcagcgcaaatgtctgaaactgactttgcacctgccctatcccgaactgaaaatgaccggcaatatgttgttctccggtttggtactgttgcttgtctgcttcgcttccaacttccttctgatggaggtctatctgagcggagtactggctcacgaactgaagaatcatatactgctgaccgccctcacgtggtatcttgccggtatttccggctacctgctcatcgcatggatctgcctcgaaccggcatggaaacgcagaatcatcaatctcattatcgctgtactgttactgcgaatcttcttcctgtcgcccacgccggaagcttataacaaattcctcccgtatctgctggtttatacgttgctgaccgcgtctttctcctggctctccatcgtacggttcaaagcgggaaagcaggactaagataatgaagaatgaagaactaaaaatgaagaattaaataaagatgaaacgtttcagtaccatactattatatgtcaccatcgccttcctgcttctctggcagttgccttggtgctacaacttctttgtcgtaaagccggagaagactcctttcactctatatagtttcgtgatcggcgatttcgccttgatgggacaggaagagggaaaaggaaccgtacgtcgcgacgctgccggaaacatctattccgaagcggctttcgacagtattctgcctatgttttatttccgccagttgatgtccgacgaacgttttccggatacgattaacgggatagcggtcactccgaagatcgtgcagacggagaatttcaatttccgcagcgtacctacggatatcaacgctccttccatcggtctttatcctctgttggagtcgatgtccgggcgtgtagacctgaagatgccggatgatgttttccgcattacttcgcaaggcatcgagtttatcgatatggcttccaatagcgtgaatgcagaaaaaagcctcttgtttacagaagctatgaccaagaagaatttccgctttccggccattgagatcgtaggaaacccgacggtgaagaaggagtacgacgaaggatatcttctgttggatgccgatcgtcgtctgttccatctgaaacaggtgaaaggacgtccctacgttcgtgccatcgctttgccggaaggattaacattagagcacctttatctgacggaattcagaaataaaaagacgcttgctttcctgacagatgtcaacaatgccctctatgtgctgaaaagccgcacgtatgatgtggtgaaaacaggagttcctgcattcaatcccgaaacggatgcgctgaccattattggaaatatgttcgactggacggtacgggtgacgagtccgtcttccgataattactatgctttgaacgcggatgattattcactgataaagaagctggaaaataattcgaatactcattatatgcccggcatcagtttcacttcttatacggacaagtatgtgatgccgcgctttgagtaataacaggaataataacttttaggcacggattacacagattaacacggttttagcgttgtgaaagtataaagctatcgtgttaattcgtataatccgtatcttttatttctaacattcacagaaaacaataaagaacctttcgcatttattcaacaagaaactgtacctttgcaagcatgaacattatccgatccgcaattgcctctgcgttgaacacaaacaaatacggtagataacaacactaatttaaagccgtatgaaaatttgcaaggcatgtacatttctgagtttcctcattatattattatacagttgtgcgcttccgcctgaggatgaaaaagagagccttgaaccggacagttcaacatcagaacttccctggacaggagaaaccgagaaattcacgattaataccaaagaaggcgtacacttaaatgatccgcaggaagatgcaggaacagcatatatcacgatcccctcttcttctgtaagaagcacccgatgggaattcggggtacggctcacctttaatccttccgccaataattacgcccgtttctatttatcctcttcatcggaaatactttccggagatctgaacggctattacattcagataggaggaacaaaagacaatgtagcactttaccggcaaaatgggaatcaatccaaattactggcttcgggaagagaactcatgaaaggaaataattctccgaaattatttatcaaagtagaatgcgacgccaacggctactggactttctggacacgcatggaaacggaaaccgaatatacgaaggagaaacaaataaaagacgcaagtatcacaaagtcaatctgctgcggcatatactgcgtttatacaaaaagccgctgtgacggtttcactttccatcatatacagttgtctgatgatgtaataacaagtactgaaccggacgacataccggacgttccggatgaaccggacaagcctgacacaccggaatcgccggaatatcctgacaatgtgagaaatatgttactattcaacgaagtgatgtatgacaatgccaaagacggtgccgaatacatcgaattctataatcctgctgatcaggatatcactgtaaagtctctgcgtctgtttaaaatgagagcaacgggagaaatattcagtaccacaatactcaaacaggaagatgaaaatacaaaccttgttattcccggcaaaggatatatttgttttactcactccgcaactacactgatcagaaagcataaggttgacggcaaaagtataaccgaaatatccaaatttccgcaactgagcaacgacggaggttaccttgccttggcaactgatgaagaacatccccgcacgattgatacctgccgtttcatagactggatgcacgacacttcagtcactacaggcatttcattagagaagatatctcctgaacttccttctctcaacaaaaactggcactcatcgagaaatgatacaggtggcacacccggaataaaaaactcataagaaggatgcatttatttgataaattccctacatttgtacaatttgtaggaaaagcatatttgaatatattcacccgcgaacgaattttaagcaacagatatgagtccaattatcttatctattactatcatagcatactttatgatccttttcgctatctcctatatagcaggacataaagcggataacgaaggcttcttcgtcggcaaccgcaaatcggcatggtatattgtcgcctttgccatgattggttccactatctccggagttacgtttgtatccgtaccgggtatggtacaagccagcggcttctcctacctgcagatggtactgggatttatcgtcggacagttcattatcgcattcgtactcgttccgcttttctaccggatgaatctggtttctatctatgaatatcttgaaaatcgcttcggagcttcttcctataagacaggagcctggtttttctttatttccaaaatgctcggagctgccgtgcggctctttttagtatgtctgaccttgcaattactcatcttcgagcctttccatattccctttataatcaatgtcatactgacagtactcattgtctggctctatactttccggggaggagtgaaatcattgatatggacggatgtgctgaaaacattctgtctggtagtctccgtcgtactttgtatctactatatagcttccagcctgcatctgaatttcagcggattggtctcaacgatttcagacagcgatctctccaaaatgttcttttttgacgatgtcaacgacaagcgatatttcttcaagcaattcctggcaggagtctttaccgttatcgccatgaacgggctggatcaggatatgatgcaacggaatctcagttgcaagaacttccgtgactcacagaagaatatgattacaagcgggatttcacagttctttgtgatcctgctcttcctgatgctgggtgtcttgctctatactttcaccgcccgacagggaatcgagaatcctggtaagagcgatgaattgttcccaatgatcgccacaggcaattactttccgggaatagtcggtatcctgttcattatcggattgatagcttcggcgtactccgctgccggatcggccttgacagccctgacgacttctttcaccgtagatattctgaatgcgcacaagaaagacgaagcggcactcagcaaaatacggaaacacgtgcacatcgggatggcgttcgtgatgggaatcgtcatcttcgtattcaatttgctgaataatacgagtgtgattgatgcgatttatacgctggccagctatacgtatggtccaattctcggactattcgctttcggcatttttactaaaaaacaagtttatgatccatatattccgttagtagccattctttctcctgcactttgctacgtattgcaaagaaattcggaagcctggttcgatggatatcaaattagctacgagttactgatattgaatgctgcgtttacttttctggggctttgcctgctcatcaaaaggaaatcgtcagcagcccctatcaacaactctttaataaaaaaacattaaaatgaaaaagaaaatcaattgcttcataccttttggcaatccgaaagatacgatacaaactgtaaaagaattgcaagcttcagaattagtgaacaaaatctacctgctaagcgctgataccaacaaagagtgcttaccggggtgtgaatgtctcctcattaacggtctctactctacaagtacgattaaaacaattgctgacaacgcagatgatgccagctatcttttgctttacacgaaacagaccccgctaaaactaggattgtacgcactggaacgcatgacacagattatacagaactcctcagaaaatgcaatggtatacgcagatcattaccaactggttgacggagttctcaaacaagctcccgttattgattatcaacaaggaagcctccgggatgattttgatttcggttcggtgcttttattcaattccgaaattttcacccttgcttcaagtattctggaggaaacagttttccaatatgctgcattttatgaaatgcgtctgatgctaggtaatctatttcaaatcatccatatcaatgagttcctttacacagaaatagaaacagatacccggaaaagcggagaaaaacaattcgattacgtaaatcctaaaaatcgggaagtacagatcgaaatggagaaagtttgtatcaagcatctgaaagaaatcaatgcctatgtaagaccttcttcccgaacagtaaacctggacagagaagcttttgagtttgaagcatctgtcatcatacctgtccgtaatcgtatccggaccattcgtgacgccgtaaattctgctttgagccagcaaacgacttttccctttaatgtgattgtgatcgacaatcactcaacggacggtaccaccgaagccctccaggaatttagtgcggacaatagactaatacatatcattccccaggagaatgatctcggtataggaggttgctggaatgtaggagtacaccatgagaaatgcggtaaatttgccgtgcaactggatagcgatgacctgtataaggatgagcataccttacagaaaatcgtcgataccttctatcagcagaactgtgcaatggtgatagggacttacctaatgacggattttcagatgaacgagatagctcccggtgtcattgaccataaagagtggacagtagaggacggtcccaacaatgctttacgtatcaatgggttgggtgccccacgggccttctacactcccatccttcgcaagatcaaattccccaataccagttatggagaagattatgccataggtctgagtatttctcgtgaatatacgatcggtcgtatttatgatgtaatctatctttgccgccgttgggaaggcaactctgacgcagcattagatatcgaaaaaattaaccggaacaatttctacaaagacagtatccgaacctgggagttacaggcaagaatccggatgcacagcatcgatgaaagttttcagcgtctcgtcaacgagatgatagaaaaacagaaaaaagactggaagctggcaaaaaagaattataaggaattagaacagaatcttaaaaaagaaaagacgctggaactcaaactaggaggggacaccaagagagtcagattcttcccaaatccacaacgggcaatctctacaatggcccagaccgactctcagtccatacaagaaagaccttgttttctgtgcaatgacaatcgcccggcagaacaaacgtctttgtcactcggacattatgaggtatgcctcaatccttatccgattttccgccggcatctgaccataattgaagaggaacataccccgcaaaccatcaaaaaccgttttgaggatatgcttttccttgccgaaaacatgaacgagttcctcatcttatataacggaccggaatgcggagcttccgcccctgaccatatgcactttcaggcagcaggaaaagaggaaaagattgccaatccttttgggatgactttcatatcggacatgcttagttctgaagatagcgtacatagtcatctagaaaacgggttcaccacgagcattggcatttcatctccaaacagaagagggatcattgaaatgtttgagtatctttacgataagatagtttctatttatcatgacaaagaacctttaatcaatgtgattgcctggtatggactcgaaacagtaaaccgcactggaggcgatgaaataaaacagtggaactgtattattttcctacgttctaaacatcggccggaatgttattatgcccaagggaaaaaaggcttattgataagcccggctattgcggagatgtgtggcgtattccccattgtaagagaagaagatttggataagataacagctaaaaaaatcactcagatttacaaggaggtcagtttgtcacaggaacagttaaaagcactcaccgatcaaacatcctagtaaagaagaaatggaagaacctcagattacagtcggtatcctttcgggaaaagaaattgaattttcttttcccgaaagcttcactactcctgacggcacaaaggtttcaggggcacaaaaggctgtttatcaaaaagaaaagatatactggtcagggaaagaatacgatgaattgatattctaccctcagccaaatgccgggatcttctttgagctaaaggatgtcaccatcggcatcaattttcattgggaacgcaaagaagtacaacgcttccagggagctttgaaaatcattgtcgaaggagagacactgaccgccatcaatgtaatctctatagaagattacctgacaagtgtcatctcatcagaaatgagtgccaccgcctctttggaactactgaaagcacatgctgtcatttccagaagctggctgatcaataaattgagagtggagaatgaaaaatggaaagctactatacagccggacagcgcagccaactctccactttccactctcaactctcaacttatcaaatggtatgatcatgaagcgcatacgcactttgatgtttgtgcggatgatcattgccagcgctatcagggaattacccgtgcttctactccacaagctatcgaagctgtttcagctacccgtggagaggtgctgatgtatgaaggaaagatttgcgatgcgcgattctccaaatgttgtggcggtgcaatggaagagtttcagaattgttgggagaatgtgaggcatccttatctgaccggtaaacgagattacataccggaatcccatgcttctgattcggagaaacaaataacaggtccggcaatacagcttcccgatctgacgcaggaagaagaagcggaccgatggatacgaacttctccggatgctttctgtaatacgcaggataaaaagattctgagtcaggttcttaataactacgatcaggaaacgactgatttctaccgttggaaaatcagttatagccaacaggaactagctgagttaatccatcaacgttcgggaattgatttcggggaaatcatagacttaatccctgtagagcgaggaacttccggacgcctgatacgattaaagatagtaggtactttacggacactgaccatcggaaaagaattagagatccgacgtacattgtcgccttcccatctttatagttcagcattccttgtggataaggaaaaaggagaagagggaaatgttccaacccgctttacactgacgggagccggttggggacacggagtaggactttgtcagatcggtgcggcagtaatgggagagcgaggttattattacaaagatattttagctcactattatcccggaagcagacttgaaaaacaatatgaataacatctgagactaatgccatgatatcaacaagaaatgccaagaacataataccaagaaacaatcgaaatccgtggagctggattccgactctttattttgcggaaggactgccttatgtggctgtgatgacaattgccgttatcatgtacaagcgcctgggattgtcgaatacagaaatagcgctttatacttcctggttatatctgccttggacgatcaaaccattatggagtcctttcgtagatctggtcaagacaaagcgttcctggattattgccatgcagggtttgattgctgccggtttcgccggtattgccttttttatcccgactccacactatgtgcaactcactctggcattcttttggctgatggcattcagttctgccacgcatgacattgcggctgacggcttttatatgcttggcctcaacaacaaagaacaatccttcttcgtaggcatcagaaacacttgctatcgtttcgccaatatcttcgggcagggaatcctggttatgttggcaggctggttggaaacatcgcatggcaatgttccaatggcctggagcatcactttctatctgatggcaggattattcctcggactgacactataccatcgctttattctccctcaccctgcttcagatgtcaaaagaccggggttaacaccgggtaagttactggaagatttctttaagacattcgtcactttctttgagaagaaaaacctgggacttatgtttttcttcctgctcacctatcggttgggagaatcccaacttgctaaaatagcctctccattcttattggatggtgccgaacaaggcggattgggattatcaaccgcatccgtcggagtcatttatggcaccatcggcgtcgccgccctactgataggcggcatcatcagcggtttcctcgtttcccgtgacggttttaagaaatggatcattcccatggcgctggccatcaacctccccgaccttttatatgtctggatggcagcagctactccggacaacctcctgttaatctccatttgtgtagccatcgaacagttgggatacggcttcggcttcactgcttatatgctttatctgatttatattgcagatggtgaacacaaaacagctcattatgccattggaacaggttttatggcacttggcatgatgcttccgggaatgccggcaggatggatacaggaacatctcggatacaccaacttctttatctgggtatgcgtatgcaccattcccggcatccttgcttcatggatgatccgcaatcgactggacagttccttcggaaaaaagagataaaattgaattacttataacttaacacattaaaaagtaacagtcatgaatgtaacaacaagtaacaaacgcctattggcactcgatgtgatgcggggcatcaccatcgcgggtatgatcttagtaaatacgcccggttcctggcaacatgcgtatgctcccctcaaacatgccgagtggattggattaactcctaccgatctggtattcccattctttatgttcattatgggaatctccacgtacatctctttgagaaagtacaatttcaccttcagtgttcccgcgggtttaaaaattctcaaacggaccgtgatcattttcctgattggaattggcatcagctggctttccattctctgcttccagcacgatcccttccctatcgaccagattcgcattctcggagtcatgcaacggcttgctttgggatatggagttactgccatagtcgctttactcatgaagcataaatatataccttatttaattgctgtacttctcattagttattttgcaatccttgccctcggcaatggatatgtctacgacgaaacaaatattctttccatcgtcgaccgtgcagtattaggacaagctcatatctatggcggtcagatacttgatccggaaggactgcttagtactatttcagccatcgcccacgtcctaatcggcttctgtgccggaaagctattgatggaagtgaaagatattcatgagaagctggaacgtttgttcctgataggtactatccttactttcgcaggtttcttactgagttatggttcccctatctgcaagaaagtatggtctccttccttcgtactcgtaacctgcggtctgggttccagttttctggcattactcgtatggatcattgacattaaaggttataaaaactggagccgtttcttcgaatcgtttggagtaaatccgctatttatttatgtattggcagatattctggcgattacgctggcagtcattcctatgacctaccaaggtgaagcgacttctttacatggctatatttacagtgcactcctacaacctgtcttcggagataaaggaggctcactggtatttgccctgctttttgtccttctcaactgggcaataggctacattctatataaaaagaaaatatacattaagatatgatactcattgcagacagtggttctaccaaaacagactggtgtgtcgtactgaacggcacagttatcaagcgacttggaacgaaagggatcaaccctttcttccagtcggaagaagaaatccaacagaagctgacagcttcccttctgcctcaactgccggaagggaaattcaatgcagtttacttctacggagcaggttgtacacccgagaaagctcccgtcctccgacgggctattgcagacagtctgcccgttatcgggaatattaaagctaattcggatatgctggctgccgcccacgggctatgtggccaggaggctggtatcgcctgtattttggggacggggtccaattcttgtttttacaatggaaaagagatcgtcagtaacatctctcctctcggatttattttgggagatgaaggtagcggtgccgtacttggaaaactgctggtaggagatattctgaaaaatcaacttcctgccaccttgaaagaagagtttctgaagcagttcgatctgacgcctcccgaaatcatcgaccgggtttatcgccagccctttcccaatcgttttttggccagtctctctccttttatcgcacagcatttggaagaaccggctatccgccaattagttatgaacagctttatagctttctttcgcaggaatgtgatgcagtatgattacaagcaatatccggtacacttcatcggatcgatagcctactgttacaaagagattctacaggatgctgcccgacaaacaggtattcagataggtaagattctccaaagtccgatggaaggattgattcaatatcatagccaattatcattccatccttaataatagaagaacattctaaagactaaaagcacaaattatacttcaatcttttaatgccacgcagttatgtaaagaatgataaccatttattgacccgtgtttagggccagtccgtaaaacactgattctcaacagataaaaaacatctagaatttctttaaaagaaaagatctgttggttttaaaggaacggtgtcttggttttaaaggaacgacccgttggtttaaaaccaacgggatcattctttcttcatattctcaatacaatgggctaagcggttgattctgtaaaataaattatctacatttctaccaagatacggaatacctttcccggatcagctgcccattctttcattgcctccaaagcatcttccggttttgcaatctttgagatcagttcttctaccggacacttaccttctttcatatagttgattaccgcacggaaatcagcaggcaatgcatttctggaaccacgaatatccagttctttctggacgaaatacttggtctgaaaagcgacttcttttttggcgtagccaatacaaaccacacgaccggtaaagccaacttcatccacagccattacataagtcacaggactgccgacagcttcaatcacgacatcagctccaaaccctgcggtgatttcctgtatccgctcatgtacattctctgttttagagtttactgcgtaagacgctcccactcttttggccagtaccagtttttcatcatccagatcgaccgcaatcaccgtcgctcctctcaaggcagcacgtacaatagcgccaatcccaatcataccacagccaatcaccatcacatactcattatcgatgacctgagcacgggaaacagcatgaaatcctacactcatcggctcaatcagagcacagtcacgggatgagatattacctgccgggataatcttcgtccaaggaagcacggcgtattcgcacatcactccattccgttgtacgcctaatgtctcattatgctcgcaggcattgacacgcccgttacggcacgaagcacatttaccacaattggtatatgggttcaatgttacattcatccctttctcaaagccagccggaacatccggaccgatctcttcaatcactgctcctacttcatgccccggtattacagggagtttcaccatcgggttacgccccagaaaagtgtttaaatcggagccacagaagccgacatacttgattcttaccaatacttcaccgacaccgacggccggcttttccagttcaaccaccttcatttcggaggggttgacaatttgaactgctttcattttatttgtttgagataaatttattaatcaattactttatagcccttccaaccgtaataggcacaaaacgcaaaacaaatcatcggtatgccataagcgacataataaatatgttcattaacgtgcatgaagtacgctgtcaactgaggaagacaggcattaccgacaattgccattaccaaaaaggccgaaccgctctttgtctgatttccgagtcctttcagtgccaaagagaactgtgtaggatacatgatagacataaagaaagagatggcgagcatcgcatacagtccgatcattcctccccatagcatcacgacaccacacaaaaggatattcatcaaagcatacaccagcaacatatcctgcggacggaacttgaccatcaatcccgtaccaatccagcgccctagcaagaaggccagcatgtacagtccaaagaaagtggtagccgtatcttccggcaaaccggcataggtgcagcagtaaacgagaaacagactgttgatagctgtttgcccaccattataaaagaactgcgcgatgactccccaacgtaaatgcgagcgtttcagcacatcgaaatcaatcagtttttctttctttccggatgcaggttccgctccttcatctccaatcttcggcaattttgagaaaacaaatacgaccgctatcgcaagaagcaacagagccaatatcagataaggaagtttcatcgcatccgtttccagttgtatataagcctgccagcctcccggacaatcaacaggaagcgtctcgcgtgtataatgggtaccgcttagaatcagcttgctcagaaacatcgctgcgataaaagcgcctagtccattgaaggattgcgccagattcaatcggcgcggagccgtttcgggagctcccagcacggtgacataaggattggcggctgtctccagaaaacacattccggtagcgataatgaagaagatgcagagataagcccaatattctttcagcatggcagcaggaaaaaacagcaatccgccgacagctgccagcaacagcccgaagatgattcccgccttatagctataacgcttcatgaacatagctatcgggatagggaaaataaagtaagccagccaataagcggtctccgtaaaagaggcctcgaaagtgttcagttcacaggttttcatcaactgccggatcattgtgggaagcagattgctgctgatcgcccacaagaagaaaaggctgaaaaccagtgcgagaggaatggtatatgtattctttttcatgtgtacagtgattgtttagcggtatagtggctgtttcctttctattccgacatatttttaatgtacgggagttccggaagttctgcaaacccgtagaatttccgcgcattcccgcccaggaataacgttttctccacttccgacaattccagggatttcaccacaaagtcataagacatcttataagtaatggctgttatcgtgcgcggatagtccgagccccacatcagtttctccataccaaccagttctgcggcttcacgaatagcctttatggcacctttaaacggataaaactcgtcattgaacagccatgtgataccaccggactcaatcatcacattcggatgacgtgccaacttaatctgctccttccaatccggaagagtaaccatcccgaaatggccgacggcaatcttcaatcgaggacattcctgaataatctcttccatctccggaacctgtatcgccccctctgccaagtcgactgacaagatcactccccgctcttccatccaccggaacatctgcatcatttcaggacagttcaacattacccgtccctctttcagaagtaagcgctgggcaggaatcttaatcgctttaaatcccttcccgatcagttctttcgcctgtcccagatagcccggcttgcgaaactcacacattccgcaaacaaagaaacggtccggatagcgtgaaacaacctccatcagataatcgttctgaatgccgtctataaattcttgtgtaataaccgcagccgagacttgggcataatccatattggacagaaaaacttccgcactattcaccccgtcaatcataaaaggaggaaccatctgccgaatctcccccataaacagggagcgtccgttctctaaagtacggataggaaaaccatcgaccaccgtatcttggcgaagccacagatgggcatgcgcatcaataatcgtataatccatagaatcgaccgtttttttaagagtttgcccaacttacacgctgctgttctccgataatttcccgcacttcacgcacgagttcccaatcgatcgattcttcaataaagccgatatttttcttcacattctccggattagtggtgctgaacagggtagtcgcaatctttggattactcaccgagaattgcatagcgagcttttctatcggataattctttgctttacaatgctccatcgctttgcgacaggcatctaccaatggcttgggagccggatgccagaccggaacaccacgttcgctcagcaagcccatcgagagaggagaagcattgatgacaccgatttctttcgattcgaaatagtcaaggaagtcagccaatttatcatcgcacagacaatagtgacagaagctaagaacagattcaatagttccgcttggcgaacggtctatcacccatttcaagttttcgagctgcaagtcagtgattccgacatgtcctaccactcctttctcacgcagttcgaccaaagcaggcaatgtctcattaaccacctgattcaggtcggcaaactcaatatcatgcacattgatcaaatcgatgaagtcaatattcagacgttccatactttcatatacactctccgtcgcacgctttgccgagtagtcccatgtattgactccgtctttgccatagcgtccgactttcgtagaaagataataacggtcgcgaggaatatccttcagcgctttgcctagaacagtctctgccttataatgtccgtaataaggggaaacatcgataaagttcattccggcttcgatggctgtaaacacagcctgaatgccttctttttcttttaaatcatggaaaactcctcccagagaggaagctccgaagctgagagacgatactttcatccctgtctttccgatttcatggtattgcatacgtatagggttttaaattattttgtatgcgacaaaagtaaggggtgaacccttctcaacggacaagagaggggcgaaaaagctacgtaacggtttacgtaaacaatctttctttaaatgcggagatttatcagggaatatgctttctttgcagataaatctaagttggagaccttcagatggaaaaccggaaacatacttcactcaaagacctcgcccaagcattaggcgtatccatccctactgtatcccgagcgctgaaagacagcccggaaatcagccgtgaactttgcgccaaagccaagaagctggccaaagagatgaattatcgtcccaatcctttcgctatgagtctgcgaaagaatgcaccgcgcatcatcggagtgatcgttccggatattgtcactcatttctttgcctccattctgaacgggatagagaacatggcgatcgataacggatatttcgtcattatcacgacatcgcacgagtctttcgagcatgaaaaaaggaatatagagaatctggtcaatatgcgggtagaggggattatcgcctgcctgtctcaggaaacaactgacttttctcattttgctgcattgaaagagatcaatatgccgctgattctgttcgaccgtgtttgcctgaccgatcaattctcgtcagtaatagcagacggagcacaatccgcacaaatggctacccagcatctgctggacaatggaagtaaacgggtggcttttatcggcggtgccaatcatctggatattgtaaaaagaaggaagcatggttatctggaagccttgcgcgataaccggattccgattgaaaaggaattagttgtctgccggaaaattgattatgaggaaggacagattgctacggaaacattattatctctcccccagcctcccgatgccatccttgccatgaatgacacattggcttttgccgctatggaagtaatcaaaaggcacggacttcgtattcccgacgatatcgccatcatcggatacacggatgagcagcacgccaattatgtggaacccaagctatctgccgtatcgcatcagacttataagatgggggaaacagcctgtcaactgctgattgatcagattaagggagacaggacggtcaagcaagtggtgattccgacacatttgcagataagggagagcagcataaaagaaaaataagtcctgtattttatatcatttactttttaccgttgattttttatcctcctaattaactatatttcatttagaaatagttatttttgtagaaacaaacactttatgaaatcaaactacacaatctttttaatagtactattcattacattaaatgcatgtcataaatctgatattatccctcaactccaattagcagattcattaatgcttagtaaacctgatagtgctttaaacttattaagaagtttttctattcaagaaatacccagtaaatcagctaaagcaatgtatgcattgctcttaacacaagctttagataaaaattacattcaacatcaaaatgactctataatatcgatagcaatcgactactataaaaataaagataacaacaatttaaaagctaaatcatatttttatcttggaagggtataccaagataatgaagaatatgtaaaagcaacagaggcgtatttaacagttctgaaatctaccccgactgataaaacctttatattacaggtttacaataatttagcgatgtgctacgaaaatcaagaattttatattcaggcaataaaaacatataaagaatcttattctactgctgaactattaaaagataaatatggtattcttcatgcgacgcgaggcttaggtaacatttatgcaatacaagacgatgaagacagcgcactaacttattatcaaacatccttagccatagcacaatctatcaatgattccatatggcagactgccatattatgtgatatagcaaaagtttatgataatttaggaatgcatatagaagcaaaaaagaatatagaacatgcattaaaatatgcaccttataatacaagtttttcttccatttacttttggaaagggattattttacgcaatttggaagaaacagactctgctatttgttatttatccaaagctaaaatcaatgcagatatctatgcaaaagcatctatctaccaaacattatacgaaatagataaaaaaagaaaaaaatatgagcaagctattttatacaatgatacagcattagtttattatgattctatacaaaagatggttcatcatacagagattaatagtctcataaaaaaacactctacagaaatgtatgaacagcgcgtagaaagtcagtaccaaaaagataaagcagtattaatcatttgcatattattgacaatatcctttgccatatttatactaatgtacatcagcaaccgcaataaaataaaatacatatatctacagcaacttcttatgaaaaaccaaacagaaaaagctgtattaaaagaagaaattaaaacaatatcacacactaacaaaattaacgaacaaaagtacatagatatagtaaataaaagatttgaattatggcatcaaagccttcaaacatgtgtacgtctattcaaaaccaccacatcctataagaaaatacaattaattgaaacatctaaaataaaaagagaaaaaggagtatcccaagaagatatttcattaatttatcaagaaataaatgaagttttcacggaagcaatgcaggagcttcttaaccaatatccaaatctaacgcaggaagatctctattactgtatacttaattatcttcaactttctaatgatactatcaaaaaatgtatgagggttgaaagtcaatatgcgctcaaccaaagaaagtatcgcataagaaagcaactatccaatcaaactttctctgtaatatttgatcttaaaaacgataaaagatagtcctgcaaaagaaagtgttatcattatctcatttttgttatatcaaaaacgcaacaccctgattatcaagatcgattatctttcatattgttatttcatgttattgttccgcatacgcaaacatcgtaattttgcaacaaaccaataacataaaatcaatatgaaacgaaatctacttttattctctcttatggttatttgttcaaatcttatctttgcaatgccattagatacaagaaaacaaatcaagatgaaggtcagagtaaagatagagcaccgctctgcaaatttaccatctcctgtacaagcctacgtaaataactcattattagaaatagaattcgaacatcctagcaatgatgtaacaatactcataattaattcaactaccggtgaaacagtttactatgaaaaaacaacatctttcgagaaaatcaaattcatcaacttagataaacactacaaaactacagaatatactcttaaagtatcctctcctttatgggtagctgtaggagtaatttccatagaataataaagttatgaaacgtaccaaatattctatatttatcatactgtttgcattactttgtccttcatgcaactctagaaaaaaatcatcacataatgacagagagataattgcagaattaggagaagaagtactttatactgatgaattaaatacgatcattaaacaagaactctttgacgaactaaacaaaatttatgaaataaagaagaaggcagttgagcaattaataaacgttaagttactacagaaagaggctgataaaaaacaactatcttatcagcaatatattgataattatacagataatcaaatccagcgattgggaatagattctctttcaaaacgttataatctgaaatcaattatagaatttcgtgatgctaatatgtataatgtagccacaaactctcccactggaaagatatcaggattatatcgcttgaaaggatttattatagataatttgctggattctttaaaacaaaataaaagaatagtgcaatatatttatcctcctaaaagtccatccattgatttaagcaatctgcacacttattatagaggaaatcttcaatcaaaagtatctattatcattatatctgattttgattgcgaatcttgtattaatgctcacaatctatatgaaacaatatatcaaaaatacaaagaaaaagtcaaatttggctatatccactattcggcaacaccaacttttgcccaaatagcaagtgaagcagccaatagacaaaataagttttgggaattccatgactcattatacacgcataaaggatacatagattcaataactgtatataatatagcacatagtacatccatggatattaacaaattcaagaaagatattgaagatgatgcagggaaaaaattaattgaaaaatcgataaatcaattagtactactcggtgtttatgcaaccccaacaattatcgtaaatggacgtttgattgttaattccaactcaaaacgagagatttgtcatcttattgacgaagaactatcaaaataatttttatttatccacatttattaaaaactgtattatgaaaaaagttacttttttttgtttcagcattttattagcttcttgttctctaaatgaagaagaaagagcgatgagtgcaagtgaaaacacacaattatctgacgaactagaaagtgtagttgctgattacgaattaacattaaaaggatattcttttgatgagttaaacaaagagaaagatgaattaactcctactacacaagaagaaacatgcgcggaacccgaattaatcaaggctatccaagattcattaaacaaactaatcttagcttatgacagtaaaacacgaactgacacaagagcttatggcggaaatgcccccaaagttggagtatttaagtatggtacttgcagtggtaatcgagaatttgtataccgaatggactgtgaagatggaggagatacacatgcaaccggcaatgttggttctacaaccgttgatggaaatgtaagatttagattttgcttagtagatccaggtaattatggtggaggtactctgattttatatgattatgtatggaatatcaatgaaggtgatgtagatcttgtaaagagatatcatgacaatgaggatcataaaaataaaaacagcttagaggataacggaggtttagtatccactggtttatctaatttcgggcataatacaactctttactggagatttagtgacaagcctgcacaaaaattaggctttcaacatggagttttaagaaaagctagttcaacacctattcctaatgcaataaacagcatatacatagacgacgaaaatggaaagaacggaaatgaagctatcttgtggacatatagagctatcaagaatggtccaacaggacctcttgttccacaaatatctagtcgtaatttaaacggtgaaacatttaggggcattacgacaggcaataacacaacttattatatcgatataatgaacttataatatgctgtttccagacaagttcctcaatattgaaaattattagatcactctccaataaaaattccctttattttagtataattctcaatagaatcaactaaaataaagggaattttaatattttaagtacgccgattacaaggactactaaatttctatcctaccaaactttacttgtaatcagctcataaacatacttattttcaacaatctaataatctgaaactaccgattccagttttatatcaaagaccaaaacagaatatccgggcataccatcccggtcactagttccatatcccatatcccaaggtaaataaacagtccatctctctcctgtcctcatcctctgcaatgtttcgatccatccatccactggtataatatgaggaggattagacattgaaataggattcacccagaattctgttggagaatcaaagtccccaggatcttttccggtaaagttctgatcaaacacctcacctgtataataagatccacgataatacgctgatacaacattcggtattacaggacgtctcccctcgtcatttttcaccgttctcttatagaaaatcttcattcccggatccgtaaaaggtacaaagaattccaattcaggatcagtttttgcatcatacacctgctgcaaagaatctaaaaaggcctcgttacgcgcccgccaattggcaaactttccctcttcttcggtttcgctacaagaaacaaaagccaaagccagtaatactaaggagaataaatagatttttttactcattcgttaatggtttattgtaaagttttcaataatgaggtgatgctcactctgtctgcaatgatattgttcagttcagagatagctacacgctcttgctgcatggtgtcgcgattacgcaatgtcacgcagttatcttctaatgtctgatgatccactgttacgcagaacggagtaccgatggcatcctgacgacgataacgcttgccgatactgtctttttcgtcatattggcagtggaaatggaacttcagagcatcgatgatctcacgggccttttcaggcagaccgtctttcttgatcaacggcataacagccagtttcaccggagcaagggcagcaggcaatttcagcacaacacggctttctccgttttccagttgctcttcgcaataagcagcgctcatgatgctcaggaacatacggtctacaccgatagaagtttcaatcacatacggagtgtatgattcattcaattccggatcgaagtatttgatgctcttgccggagaatttctcatgctgagacaagtcgaagttcgtacgggagtggataccttccacttctttgaaaccgaatggcatcaggaactcgatatctgttgcagcattggcataatgagccaatttatcgtggtcgtgatagcggtagctggcatcaccgaagcccagcgctttatgccatttcagacgaatctccttccatttcttgaaccaatccagttccgttcccggttttacaaagaactgcatctccatctgttcgaactcacgcatacggaagatgaactgacgggcaacaatctcattacggaaagccttaccaatctgggcaataccgaaaggtactttcatacgaccggttttctgcacattcagatagtttacaaagataccctgtgccgtttccggacgaagataaatcttcatggcaccgtctgaagtcgatcccatttctgtagagaacatcaggttgaactgacgaacttccgtccagttcttagtaccggaaataggacatacgatctcttcatcaacaatgatctgacgaagttcatccagattattatcattcagtgcttttgagaaacgagtgtgaagtgcatcacgcttagcctgatgttccaacacacgtccgttggtagaacggaattgagcctcatcgaatgattcaccaaacttcttggcggcttttgctacttctttattgattttatcgtcatatttagccaactgatcttcgatcaatacgtcagcacgataacgttttttagaatccttattgtcaatcaaagggtcattgaatgcgtccacgtgtccggaagccttccagatggtagggtgcataaagatggcagagtcgataccgacaatgttttcgtgcaacagcaccatgctgtcccaccaatattttttaatgttgtttttcaattcaacgcccatctgaccgtagtcatatactgcgcctagtccgtcgtagatatcgcttgaaggaaatacgaagccgtactctttacagtgcgatacaagtttcttaaaaacgtcttcttgtgccattttcttttctatatctattaatttgaattaccttttttcgtaaaaagtgccacaaagataggcatttatctcataaataagacagggagggtattaatttatcttattcttctgtttgttcctgctcctgatctgctttcttcatctctttagtcaacatactttcgggcatataatatttaaaaggaatgcgcatacactttgttttcttcatgcggtcacgaagtgcactgtttgccacaaaataaacgcgggataccgatacttgtcccggtgtcacttgttcgggacgttcaaaaccaggactggtcaaagcagtctggaatgtacccagcccatcaatcgtcacagactgtcccatagaaagcaaatagcggatggcatccgctacttccaccaatatgccttcaacctgaccacggtggaaacctccccgcagctccaccacttgggctagttctttgttctgtactccgcctctatcctgtattttacttggtacaccataccataactcttttctttctccggacgtcaagtccgctttctttcttactacataagggattgccatgtcttatactcctttcttgtttcgtttatattttcattctgtacgacacccgggtgtcagcacgtatgacacccggatgtcagacatcacaacacccgggtgtcgtacagcacgagccccgggtgtcatacatatcttcttcgcaacaaagttagactattatagaaagaaaacaaactaatatttatatatttgtttccataaactttaatatacccgcacacactatgataaaaatactactgctgatcgattattccagtgaatttgacagaaaattgctccgcggacttgtacaatattccaaagaaaacggaccttggcttttctatcggcttccatcctattacagcggcatgtatggagaaaaaggtattctcaaatgggcaaaagaatggaaagctgacgccatcatcggacaatggaacaatgacaccgtcaatctactgaaagaactgaatattccgattgtattgcagaattatcaccatagaagcactacttactccaatctgacgggcgactacaaaggaacgggcagaatggccgcccaattcttcgccaagcggatgttccacaactttgcttatttcggcataaacggagttgtctggtctgacgaacgttgcgaaggcttccgtcaggaagttaaacggataggcggcaacttttattgtttcgaatccgataagcatgaagacgaaatcagaatagaagtaagccaatggctgcaagagcttcctaaacccatagcgttgttctgctgcgacgactcacacgcactattcatttcggaaacctgcaagataagtaacatacacataccggaagaaatctccctgttaggagtcgacaatgatgacttgatctgcaatatttccgatcctcccatctcctccatagaactggaagtagaaagaggaggatattccataggcaggctcattcatcaacaaatcaaaaaggaacatgaagggaccttcaatatcgtcatcaaccctatccgcatagaattgcggcaatccacagaaaagcataatataaaggacccttacattctcgaagttgtaaaatacatagagagtcattacaattccgacctgaccatagagtctttgctggcacagattccgctctcacgcagaaattttgaagtgaaattcaaaaatgcgatgcatacttccatctatcagtatatcttaaactgccgggtcaaccatctggccgatttacttcttactacagatcgttcattggcagacattgcaacggaagccggattcaaagactataataatatctcccggattttcaaaaagttcaaaggatgttcccctttggaatatcgggagaaaaaaatcacgaacagataaaaaataaattattcgtttttcgaatatagcttttcgtttttagtaccggaggcattactaaagtggcatatctttgttcggtaaatgttaactctcaaagtcaatcaacaacttatggagcaaaagaaaatcgtgctattcatcctgatcactcatctggcagcatttctagcaggatgcagcggaaacaaaaatagcggaaataatgactcctctgatctatggaataagttatcgagctacttccgcccgcccgcagaatacgaaaatgtatatgggaattttcgctctcctttattatattataatggggatacagtcagaaccgttgaagactggcaaagacgacgaactgaaatcaaggacagatggatgagcctgttaggacaatggccgcctgtcattaccggacaaacatttgaaattctggatactctccaccgtgaaaacttcatgcaataccgtgtccgcttctactggactcccaacgaacagactgaaggttatttgctggttccggacaaagaaggcaaaaagcctgccgttatcactaccttttatgaacccgaaacggctatcggattgggtggaaaaccttatagagactttgcatatcaattgacgaagagaggatttgtcacattatcaataggaacaacgaagaccacagagaatcagacatattccatttattaccccaccattgaaaatgcaactctccaaccactttcagcattagcttatgcagccgcaaatgcatgggaagtattagccaaagtacaggacgtcgattctacaagaataggcatcacagggcattcctatggtgggaagtgggcaatgtttgcctcatgcctatacgaaaagttcgcttgtgcggcatggggagaccccggaattgtattcgacgaaacaaaagagggatatatcaattactgggaaccctggtatttgggatattatccgccaccatgggaaagtacatggagtaaaaatgggcatgattatgctaaaggcatttatccgaagctccgcaaagaaggatatgatttgcatgaattgcatgcgctgatggcacctcgcccatttcttgtttccggaggatactctgacggaacagaccggtggacagcgctaaaccatacaatagcggtcaaccggctcttaggataccgcaataatgtcgcgatgagcaacagagtcaatcatgacccaacccctgaatcaaacgaaattatatatgatttttttaaatggtacttgtattcagcaaataaatctaccaaagagtagaaagatgcgttttttgaatacactttttcgtttttttgcgcaaaaaatcgactctggatgcctaactttgttctatcaattcatccaagtaacctaaattacttgattaaaatgattagcctatgaaaaatatacactagaaaacataaaatgccccatctgcgaatggggcaatattaatgccatattaataaaactaatcataaattatcacccaattaataaataacgcaataataaattcacaattaataaattaaaagtgctaacccaaaggaattaataaagctagcagataattccgagttagtaataaatattaaattattaaaaattcaataggttaaatatatactaaaaagagtagaaactaaaaaaagtaaactatggaagcgaataatcgcagagatttcttaaagaaagccgcattagcgggagcctccgccctaatggctcccacactactggccgctgaaggcaaagatgaaagtgaattcgttctctctccgagcaaaaggacggacagcaaattaattgtaccgaaaaataatggtctgaaaatcacaggcacttttctggatgaaatatctcacgatattccacaccagaactggggagaaaaagaatgggatctcgactttcagcacatgaaaaggattggtatcgataccgttattatgatccgttccggatatcgcaagttcatcacttatccgtccaaatatctattaggaaaaggatgctatatgccttccgtggatttagtagatatgtacttacgactggctgaaaaatataacatgaagttttattttggactgtatgacaccggtcattattgggatacacgtgatatgtcgtgggaagtggaatataataaatatgtgattgacgaagtatggaatacttacggcgagaagtataaaagcttcggaggctggtatattagcacggaaatcagccgcaataccaaaggagctatcggcgcatttcatacaatggggaaacaatgtaaagatgtatctaatgggctccctacttttatatccccttggattgatggtaaaaaggcagtcatgggaaccggaaaaatgacaagagaggatgctgtatccgtagaacaacatgagagagaatggaatgaaatttttgatggcatacacgatgtagtagacgcttgtgcgtttcaagacggacacatcgactacgacgaactggatgcttttttcactgtaaacaagaaactggcagacaaatacggaatgcaatgttggacaaacgcggaaacattcgaccgcgatatgcccatccggttcctgccgatcaaattcgacaaactccgcatgaaactggaagcggcaaaacgtgccggatatgataaagcaatcacttttgagttttctcactttttaagtccgcaatcagcttatctgcaggcaggacatttatatgacagatacagagaatactttgaaatcaaataaactatatgaaaacaacaattaatctgggttatatcatattcctttcagtcgttgctgctttaggaggctttctgttcggttatgacacagctgtcatatccggcacaatagctcaggtgacacatctgtttcagttggacaccttgcaacaaggatggtatgtaggatgcgcattgatcggatcgattgtcggtgttctcttttccggaatattgagcgacagcatcggacgtaaaagaaccatgatactttctgccattctgttttctacatcagcaatcggctgtgctttttgtattgactttaaccagttagttgtttatagaatcataggtggcatcgggattggtgtcgtttctattgtatctcctctttacatttccgaagtttccatcgcacaattcagaggcagaatggtctccctgtatcaactggccgtaactgtaggttttctaggagcttatcttgtcaactaccagttattggcatattcagagagtggaaatcacttgcctatagcttggttagaaaaaatagtagttacagaagtgtggagaggtatgttaggcatggagacactaccagccatactattctttattattatctttttcatacccgaaagccccagatggctgatagtaaaaggacaagaaaggaaggccacttatattctggaaaagatttacaattcatttaaagaagctgatttccagctaaacgagacaaaatccgtccttgtttccgaaacccgttcagaatggtctatccttctgaaaccaggtattctgaaagcagttattatcggtgtatgtattgctattctgggacagtttatgggggttaatgcagttctctactacggcccttctatttttgagaatgccggtctttcaggaggagattctctgttctatcaggttcttgtaggacttgtgaatacactgaccactatcctggcacttctcatcattgacaaagtaggacgcaagaaactggtatattatggggtatccggaatggtcgtttcattgatactcattggcagttatttcctcttcggaaatgcctggaatatttccagcctgtttctgttagccttctttctgtgttatgttttttgttgcgccatttccatttgcgctgtgatattcgtacttctctctgagatgtaccctaccaaagtacgcggattagcaatgtccattgccggattcgctctttggatcggcacctatctgatcggacagctaaccccctggatgctccagaaccttactccagccggaacattcttcctgttcgccatcatgtgtgtaccgtatatgctcattgtctggaaactcgtaccggaaactaccgggaagtctctggaagagattgaaagatactggacccgttcggaacggtaaaatagaccttattaaataaaaaaactaacaattatggattttaaaaaattagcaaaccaatacaaagacgaactactgaataatgttcttccattctggttagaccattctcaggatcacgaattcggtggttatttcacttgtctggatcgtgaaggcaacgtattcgatacagataaatttatttggctacaaggacgcgaagtttggttattctcaatgctttacaataaagttgagaaaaaacaggaatggctggattgcgctattcaaggcggtgagtttctaaagaaatacggacatgatggaaactatcattggtatttttctttggatcgggcaggtaatcctctggtagaaccatacaacatcttttcctatacatttgctacaatggctttcggacaactcagcctggctacaggcaatcaagaatatgccgacattgcaaagaaaacgtttgatattattctttcaaaggcagacaacccgaaagggaaatggaacaaaatccatccgggcacacgtaatctgaaaaatttcgcccttccgatgatcctttgtaatctggcacttgaaatagaacacttgttggacaaagagtatctggaaaaaacaatagagacttgtatccatgaagtgatggaagtattctatcgcccggagctaggaggaattattgttgaaaacataggagtggacggcaatctcgtagactgttttgaaggacggcaagtgactcccggacacgacatcgaagcgatgtggtttatcatggatttaggaaaacgcctgaatcgccctgatctaatcgaaaaggcaaaaaatgtaaccttgacgatgattaactacggatgggacaaagaatatggtggcatctactattttatggaccgcaaaggttgccctccccaacaactggaatgggaccaaaaactttggtgggtacacattgaaacacttatttccctactaaaaggttaccaattgacaggtgacaaacaatgtatggagtggttcgagaaaatacatgagtatgtatggacgcacttcaaagatgctcaatatcctgaatggttcggttacttaaaccgccagggagaagtacttctgccacttaaaggaggcaaatggaaaggctgtttccatgtccccaggggcttatatcaatgctggaaagtactagaagaattacaataaatctaatacccaaaaacttttttattaaccaattaaattttatcttatgatggaacaatgctttaagcaaaaaagtagtttccgaacaatcagaatcatactattctcattgtcgatgctttttgcgtatgccacaaatggctatgcccagaacatggttaggggagtcgtcacagacgtgaccggtgatccgttgccaggagtcagcgtcgttgtcaaaggtacgaccacaggtaccactaccgatattgacggtagatactctatcaatgtaccttccacaggtacattaatcttctcatacattggtatggccaaacatgaagttaaaacacaaggacaaacgaccatcaatgtcagcttgtcagaagatgtatcaagtttgaatgaagttgttgtagtaggctatggaactcaaaagaaagtccacttgacaggttctgtcgcttctgcttcctcaaaagaaatattaaaaaccacagcaagtaatatttcacaagccttggtcgggaaattaccaggtttagtaagccaacaatctaccggacagcctggagctgatgatgtatctttcttagtacgaggttattcatcttacaacggcgctagtaccccattagtattagttgatggagtagaacgcgaaatggcacgcatagatgcgtcagatatagaatctgttactattttaaaagatgcttcgtcttgtgctgtgtatggtatgaaaggagccaatggagttatattaattacaaccaaacagggaacagaaggtaagcctgtaatcacttatcgaggcagtgttactttcaaccatgcgactaacctcccgaaaatgatgaatggtacacaatacatgcaatactacaacttagcacggcaactagacaatatagcaaatggtttggaacctggcgagggatttttcactgatgaagagattgcagcaacctacaatggggacccaacagacggatatgaaaatacagactggacatcgcccatatacaaaactactatgatgcatcaacataacctttctgtcagtggaggtacagataaaactaaatactttatcagtggtggattcctacgccacaatggtatcatcaaagaccataaaaatcaacgtggtaacttccggtccaatatcacaacagaaatcaatagaaacctcaatgttcagttaaatattgctggcaatatacaagattactatcgaccaggaggatatacttatgaaaaccaaaaaggttacaatctcttccatttaatgttatattcactaccttatgttcctcaagaatataatgggtatcccacctccggttaccgtcaatccggtagtgcagccaatgctgtatatggatcagctaactcaggatttgaaaaagcacgtaatgttcgactggaaacatctgccaaaatagaatactcattccccttcttaaaaggtctaaaagcaagtatgtttgcaagttgggactactatgatggagatggcaaaacatttacttatgcctatgatttaatggcattcactccggcagataaaaacaacgccaacaaagggaatggatattcactggtaaaaagcgcaaatctttcaccagaaggaaatatgtatgtagggaataacaagagacaaaaggtaatgctacgtccttctatctcttataacaacaaaattggtttgcatgatataggagcattatttctttacgaacaaaagaaagaaaactcaagttcattttcaggaagccgcaaggattttgatatattcgaccttcctgaattaaacttcggtgatgccgcaacagctatcattaacgggtcatctggtaaatctgcatatgctggatacgtgggacgtttaaattatgcctatgacaacaaatatcttgtagaagcttctttccgctacgatggttcctaccttttcgctgaaggtcagcgatggggattcttcccttccgtctctttaggatgggttgcctctgaagaagacttcttcaaagacttatttcccaaaatcgattactttaaacttagaggttcagtcggaatattaggaaatgataatgtagatcctttcttgtatcgtaaactatatgaactaaacggcaacaatgtagctttcggaaccagcccatcttcacaaagtacattatccaataaagtggcttatccaatgaccgatttaacatgggaaaaatgccgtacaatcaatcttggatttgaaatgaatgcctggaatggtttattaggggtagaatttgatgtattctataaatatacttatgatattctccaaaacattacttccatctatccggcatctctaggaggtcatgtacccacccgaatgaatgacggaactttcgacaacaaaggtttcgaattaatactaaaacaccgcaatcaaattggtgattttaactatagcttaaccggaaatttaacatatgcacataaccgtatattaagcaaaagacaagctgacggtacattaccttggcaaagcaccttgggaagttcaataggagatgtatggggtttgaaatccatgggcctatatcaaactcaagaagaacttgataatgctcccaaacccattggaacaaaaccacgcttaggtgacatccgctatatggacatcaatggggatggccagattaattcacaagaccaagtgaagattgcacgtaattcacgtcctgaactgatgtttgccctaatggccgatgccaattataaaggattcgacttatctattcaactacagggagctgccctttgcgacaaaatgctgcaacaaaactggtataatctaaacggtgttacagaccaaactcctttaaccaagcctttctacgcaggagtagacaatgctccactttatttagtagaaaacagttggagacctgacaatattaatgcagaatatccacggctatcaataagtcctggaaccaataacgcccagatttcagactactggaaaagaaatggcgcatacctacgtttgaaaaatgttgtgctaggatacacattccctaaacaatggatgagtaaacttggtgtcggtagcctcagaatatatgcaagcggtcagaacctactaacctttacagaatttaaatacctagatcctgaaagtgccaatgtaattaccggctattacccacaacaacgtactttcagtgtaggtgttgatgtttcattctaaatagactataaatatgaaaaatataaaaaaatacatattaggcatggctacagctttatgtttatgccagtcatgcgacgtattggatattgatcctactggaaattacagtgaaactaccgcttttaattctatcaaaaatctagacttatatgtaaaaggtttttatagcatattctacgtaaactcacaattatacgtagatgcgaactgtttgatggatgacggagctagtgatttgatcaaatattcatggtatggagtagatggaggtaaaatgaatcgtttcttctatcaaagtaacttcgtaactcctcaaggcaatttccgttctaactggaatgatatgtatactcgtatccgccagttgaatgaatatttttatgacttaaaaaaatatggaaacggattaaatccggaagaagtagctgcacgtactgcagaggtccgtttcatgcgtgcttttgcttatcaagaattggttattcgacatggaggcgtaattctacgcacatctgaagagtatatagacggcccagaagaaagagcaaaagctcgttcatcggaaaccgaatgctgggatttcatattggaagaatacaaaaaagctgctaatgatttacctgaatcatgggcaaatagtgacgccggacgtttaactaaaggagcagcttatggcatgcaagcacgtgcagccttgtatgcgaaacgctgggataaagcaattgaagcgtgtgaggaagtattaaaactagactatacattacttcccggcacgagttatgaaagctattataagatcttcacatcagtcaataacaaagaactaatattgcccgtatattacgaaaaaggacaaaataagaaacaacataattttgatacatatttttgtccgccatttgactctaagccatggacaggtggagctaataacggagccgcagctactccttcagatgaatatgcatcatcttttgacattaaagttaatggtgtgtatcaagcttttgactgggataagcttaacgtttatggaaacaaaccttttgataatcgcgagccacgcttttacgcttctattttatataacggggcttcatggaaaggacgcactctacagctatatgttgacggtgatgacggatatatggacttctccacagctggacaagacaatgttcatagatcaactacgggctatatctttcgcaaattcatgagtaatgaccctgaatacaactttactaatgtcttaagtggccaatattggatagaaatgcgattggcagaaatatatctgatccgttcagaagcatatgcccgcaaaaatgaatttgaaaaagcatatgctgatttaaaaacaattcgtgaccgcgtaggactaccccaattagaacaaaaaaataattggagtgactacctaactgatttagccaaagaacgtatttgtgaattaggtctggaaggtcatcgttattttgacttgatccgttgggggattgccgtacaaacgcttaaccaaaaacgtctgcatggtatcaagatagagaaaaaaggtaatgatttcgcttatgaaaaagtagaatgtgacacacaagatcgtttgttcccggaaagatatactatcttccctattccttttagcgagttgcaaactaacattctttgcgaacaaaatgatttgtggaaataatattatttaaccttaattccgcaacactattataaattaaactttttaagtacctgagcaacaaaaagttgctcaggattttgccatgtcagaattttcacttatcttagtgttgcaaaaaaaacaagagaatccgacgatagacatggcgaagatacaaattaaatctgagagactcactccttttgggggattattttcaatcatggagcaatttgactccacattatcatctgtaatcgactcaaccctcggtctaaggtgtagatcgttcggttatcagtacagcgaaatcatccgttctctcatgagtatctacttctgtagcggttcatgtattgaggatgtcactactcatttgatgaaccacctctcgcttcatccgacacttcgcacttgtagctctgatactatcctcagggcgataaaggagttgacgcaagaaaacatttcatacacatcagatatgggcaagacctacgatttcaatacggctgacactctcaatactttattgctcaattgtatatttgcatctggccaactgaaagagggtgagatgtatgatgttgatttcgaccatcagttcatagagacagagaagtatgatgcaaagcctacatacaagaagttccttggttatcgccctggcgtggcggttattggcgatttgatagtcggtatagagaatagcgatggtaacacaaatgttcgtttccatcagaaggacacgctgaagaggttctttgcgagatttgaacagaatgggctcactatcaatcgcttcagagctgattgtggatcatgttccgaggaaatcgtggaggaaatagaaaaacactgcaagtccttctatatccgtgctaaccgctgcagttcgatctacaatgacacctttgctctcaaaggctggaaaactgaggaaatcaatggcattgagtttgaattgaactctatccttgttgagaagtggaaaggtaaggcatatcgacttgtgattcaaagacagaaacggatggatggtgtgcaggatttttgggaaggagaatacacataccgttgtatcctgactaacgactatgattcttccgtaagagaaattgtcgagttctataaccttcgtggaggaaaggaacgtatcttcgatgatatgaacaatggtttcgggtgggacagattgcccaaatccttcatggcagagaacacagtgttccttcttcttacagcacttatccgtaacttttacaaggccattattcaaagacttgacgtaaagaagttcgggctcaatgcaacaagtcgcataaaagcgtttgtcttcaggtttatctctgtaccagccaagtggatcaggacatcaaggcggtatgtgctgaacatctatacctgtaataatgcttacgcagatgttttccagactgattttggataatgcctacaacttatgggaatgatattgtgtattgcctcaagtcacattgtggggtaaggggatattgtaggcagaagtgggtgcttcaagttcaaattatctgcaaattcagtaatgagaggacgtgtaaacgcaataaggacgttcaagggcttagttgcggatttgaggtttaaaaagaagaattatgaaaatgaaatatttatttcacggtttattagcttcaatccttctcattactgcatgtcaagagccagatgatttggtaagaagcgatagtgaaaacattaatattctttctgtcaaaggatctctaatatccgatgcagacaagcaatatgatgctgttgtcgatgaagcaaatggtactatcacagtacaggtcccttattacatctcggatactgaaaaaattcaaggagacttgactcaaatgaaagttactgcaaacatgcccactggtgcaagattcgagcctgaaatctctggcattcatgatttggttgcaggcttccaatctacattaatcaaagaagatggaacaaaaatcctttacactttcaaagcgatttatgcaaaatcaaaatcagcgctcattactaaaatagtgttaccggatataccaaatccattgatcacaatcaaatcgcctgagaacgaaggcgaaaatgggattatcgttatttataaaacatcttcctccattgatgctgctatacgttcggcacaactattttcctcaccatgggctactattgaatcaacagctatggattcagaaggttatattgatttaagccaaatggcagacatctatgttatcgcacaagatggagttaccaagcagaagtatactgtcgaaatccaaactccttctttcgttgctccaggaaaaatcggctataaatccttattattcggattccaaacaacccctgctgatcctagaggtttcgttcctacaaataaccgtagtctagccatagttaacaattatttgatagtaagtagtacaaccttagactttgtagtcctaaaccgttatagtggtgaacatctgaaagatatacaagttaatacgacaggattgcctaccggacttatccatgcaatcacacaagatgatgccaatcacatggtagccataactttctgtgcagctaataacccatggagcaaaaatcagttattcgagatttatgtttggaaaaacggcattaccaatccaccaacaaaaattatgtccgaagatattctcactagtgatgtttttgctcagttccgtagtaccaatgctggtgttgcaactacaggaacgtgggatatgggacgtaccgtatctataaaaggagacattacaaacggaactgccatattaatgtcattagcaaatagtgtaatgaaccgggttcttcgggtaaaaacagaagacggaaaagttatctccgtacatggttcagccaaaggtctttatagctggtacctgcaaagtaaacctattcctatgacaacagaagacgaatgtgattatattatgagttccaacaatgcccgaaagaatgtgatctatactcccaaagaaggaagtcagataatatttgatcctaaaggtaattggtggggtggtagtctgattggtacagcatatactgaatttaatggtgtaaaactagtggctgtccaaaattccaacacaacttccaaacctcaatattgtcgcctttgtataggaaatataacttctatgactacgacggcaatggcagacgcacaaataatggattcacgcttggacaattatgaccctgcattcggaccaactggacccaatggaaataacagttctctaaccggaatgacttcattctataatgcaatcggtgaaaatccaaactcaacaggcgacatagctatcggtcatagtgctgacggtaactctatacaagtttacatgttaactactgaccatggtattatagcatatgaattaacgaagtataatctataatcattgtttcaatcaaaagtcgataagcttttggggcaatatcgacttttgatttcctaaaattggaattgtttatctatattcctgtaaatattataattggtcatgaaaataaaagttggtctgataggttttgggcgcatgggacagttttatctaaaagaaatgcaaaaaagcggtcaatgggacattgtatacatctgtgatgtaaatacagatgctctagaacttgccaaattattatcacccgaatccaaaaccatcacagatgaacgtattgtcttcacagataagaatgtacaggtagtaggtctctttgcactcgctgactctcgaaaaagacaaatcgagcaagctattcaaagtggaaaacatatcatatcagagaaaccagtgtctgataccattgataaagaatgggaagtagtaaatctcacagaaaagtatgatcgcttctccactgtcaatttatatctacgcaattcttggtatcaccagactatcaaacagtttattgaacaagatgaaatcggagaattagcaattcttcgtatttgccatatgactcccggacttgttcctggtgaaggccacgaatatgaaggtccggcattccacgattgcggaatgcattatgtagatattgcccgatggtatgctaatagtgaatacaaaacctggcatgcacaaggagtcaacatgtggaactataaagaaccttggtggatacaatgtcatgggacctttcagaacggaatagtatttgatattacacaggggtttgtatatggccaattatcaaaaacccagacacacaattcctatgttgatattattggtacaaagggaattgtacgcatgacgcatgatttccaaactgctgtagttgatcttcacggagttcacgaaacactgcacttagaaagaccatttggcggtaagaacatagatgtattatgcaaattatttgctgattccatcaaaacaggaaaacgtaatccccgactaccattcatacgagattccgctattgcctcagagaatgcatggctctttctgaaagatgcccaccagcatgttcttccggcaattggtgaactacaaactcttgaagaaatccgtgaacgaaggaaacacctgaaaaatggatacggattactacagagtcataggtataatcttattaaataaatacaataatactatgtcagatttttcaagaagaaaattcctaaaaactggagctaccgcattagccggtatcacaatagctcctaattcaattctaggtatgagccatggccacatctcacccagtgataaattaaacatccttggcattggaattggtggacgtggtgctagtgcaatccgcagcatgtccagccaaaatattattgggctttgtgatgtagactggaaatatagcggacatgtatttgatgaataccctaaagcaaaacgttattatgattatcgcaaaatgtttgatgaattgggcaaatcagcggacgctgtaatgatagcaacccctgaccatacccatgctcttattgcggcagaagccatcacaatgggaaaacatatatattgtgagaagccattaacacacaccgtatatgaatcacgcctattaaccaaactcgcagataaatataatattgctacccaaatgggaaaccaaggcgcttcagaaactggcgttcgcaagatctgcgaatggatatggaacggagaaattggtgaaatcactaaagtagaagcatttactgatcgtcctatctggccccaaggacttagtcgaccagacaaagcagaaagagtacccaagacattaaattgggatttgttcctcggtcctgctcagtaccgtgattataatcctatttatactccctggaactggcgaggatggtgggattttggtacaggtgcattaggtgatatggcatgtcatgttcttcatccggtatttaaaggattaaaattaggatatcctactaaagtacaaggtagttctacattgcttttgacagattgtgcccctaatgcacaaatggttaaattcacattcccagctcgcgataatatgccgaaagttgcaatgccagaagtggaagtttattggtatgatggcggcatgaaaccaatgcgtccaaaagtttttcccaaaaacaaaaatttgaatgtagatggtggaggtgtcattttccacggaacaaaagacacattgatctgcggatgctacggaagaaagccttggttactctccggtagagatcctaaatgtccacctgtattacgtgaagttaaagaaactcatgaaatggactttgtacgtgcctgcaaggaaaatgcctcaagccgtattcagactacttctcccttcaaagaagcaggacctttcaatgaaatggtagtaatgggagtacttgctatcagacttcaatcactaaaccaagaattgttatgggatggcctcaacatgaaattcacaaacatagaccctaatgctaccatccaaacagtcatcaaagatggctttacgattaaagatgggcatccaaccttcaataaacaatggacagacccaataaatgctcaagcatttgctcaggaattaatcaagcatacttaccgagatggatggaagttaccggatatgccccaataattaactattaaacattaatttagaatcatgagaaatcaattttatccactattttatagtcttatagccggagttttggtatcttgcaacggcaataagaaagttgcagtatcacaagatgacacctcatctaacttcataactttaccgtgttccaaatcattaaaagcttctgagattgacagtatacaatttcccattgacaaaaatggctatatcaccctctttgacggagaaacattcaaaggttggcgtggatatggcaaagaacaagttccatctaaatggaccatcgaaaatggtagtattaaattcaatgggagtggtattggagaagctcaaaataatgacggtggtgacctaatcttcgcacataaatttaaaaactttgaactggaattagaatggaaaatatccaaaggcggtaattccgggattttctacttaggacaagaaatcacatctaaagacaaagatggaaacgatcgattagaaatgctttttatgtctgcacccgaataccaaatattagataatgcagttcaccctgacgcccaattaggcaaaagcaataatcggcaatcagcttctttatatgacttaatccctgctattccacaaaatgccaaacctgccggagaatggaataaagcaaaaattatggtatacaaaggtacggttgttcatggccaaaacgatgaaaatgttcttgaatatcatctatggacacgggaatggacagatttactgcaatccagtaagtttagcgagcaggaacgtcctttagcatttcaattattgaataattgtggaggtgataacagagaaggattcataggctttcaagatcatggtgatgacgtatggtatcgtaacattcgcataaaaatccttgattaattattattagcaatatcaagagaggatttctattacaccttaattccgcaacactattataaattaaactttttaagtacctgagcaacaaaaagttgctcaggattttgccatgtcagaattttcacttatcttagtgttgcaaaaaaaacaagagaatccgacgatagacatggcgaagatacaaattaaatctgagagactcactccttttgggggattattttcaatcatggagcaatttgactccacattatcatctgtaatcgactcaaccctcggtctaaggtgtagatcgttcggttatcagtacagcgaaatcatccgttctctcatgagtatctacttctgtagcggttcatgtattgaggatgtcactactcatttgatgaaccacctctcgcttcatccgacacttcgcacttgtagctctgatactatcctcagggcgataaaggagttgacgcaagaaaacatttcatacacatcagatatgggcaagacctacgatttcaatacggctgacactctcaatactttattgctcaattgtatatttgcatctggccaactgaaagagggtgagatgtatgatgttgatttcgaccatcagttcatagagacagagaagtatgatgcaaagcctacatacaagaagttccttggttatcgccctggcgtggcggttattggcgatttgatagtcggtatagagaatagcgatggtaacacaaatgttcgtttccatcagaaggacacgctgaagaggttctttgcgagatttgaacagaatgggctcactatcaatcgcttcagagctgattgtggatcatgttccgaggaaatcgtggaggaaatagaaaaacactgcaagtccttctatatccgtgctaaccgctgcagttcgatctacaatgacacctttgctctcaaaggctggaaaactgaggaaatcaatggcattgagtttgaattgaactctatccttgttgagaagtggaaaggtaaggcatatcgacttgtgattcaaagacagaaacggatggatggtgtgcaggatttttgggaaggagaatacacataccgttgtatcctgactaacgactatgattcttccgtaagagaaattgtcgagttctataaccttcgtggaggaaaggaacgtatcttcgatgatatgaacaatggtttcgggtgggacagattgcccaaatccttcatggcagagaacacagtgttccttcttcttacagcacttatccgtaacttttacaaggccattattcaaagacttgacgtaaagaagttcgggctcaatgcaacaagtcgcataaaagcgtttgtcttcaggtttatctctgtaccagccaagtggatcaggacatcaaggcggtatgtgctgaacatctatacctgtaataatgcttacgcagatgttttccagactgattttggataatgcctacaacttatgggaatgatattgtgtattgcctcaagtcacattgtggggtaaggggatattgtaggcagaagtgggtgcttcaagttcaaattatctgcaaattcagtaatgagaggacgtgtaaacgcaataaggacgttcaagggcttagttgcggatttgaggttacaaaaatttatagttacctctcttgatacaaaatataaaacatttatttatactatgccatctttcttccaagaaatacaagagcaactgcatcattacttaattcatataagatcccggcatatgctctgaaaacaggagaattattgcattatcacctttcattaataagcctagaatcgttgattatatgtatttcgcagtctgaaaaaagctacgaagtaaacaaactaataaaaaagatacaaagagaaaatacaaaagaagtcgtaaacccggtattctggagtgataacttcatttcattgttccctaatgagacccgtaccatcactgcgacagtatccatagaggatttacatggagaaaagcctataatcattattaaataactaataaaaccaagaaacatgaaactattacttacaaccttggcaatagtctatctaagtttgttcatgagcctgcaagcacaagaacaggtacgggttattccctatcctgctgaagtcaccatgcaagcagaaacgtgtaaactcaaatcgggtcaaaaaatccactatctggatgccagtttatataaagaagcagcattccttgaaaagaaactcgctgatttaaactataaaatgaaagtaatccccagcaaaaaagccgcgaaaggaatcaacttatcattagacgatagactgcaaaacaaagaaggctatcagctgattatcgcccccaaacaggtcctcatcaaagggggaagtccggctggagttttctatggcattcaaacactattacagcagttaaccaacggagatctaagatgtggaacgatagaagacgccccacgttatgaatggagaggatatatgcttgatgaagcacgtcacttttctggcgaaaaaagggtaaaacaaatccttgacctgatggcatattataagatgaatcgcttccattggcatctgacagacgcacaaggatggagaatcgaaattaaacaataccctaaactggcaactataggaggagaaggttgccatagtgatccggatacaccggcacaatattatacacaagagcagatccgtgatatcatagcatatgccaaagaacgtcatattgaaattatacccgaaatagacatgcccggacatgccacagcagccaataaagcttacccggaatactcaggcggaggaacggaagaacatccggaattcacttttaacgttggcaaagaagaaacttatacttatctgactaatatactaaaagaaatagctgccttattcccttctccatatttacatatcggaggcgacgaagtagcttacggaatcaaggcatgggaaacagacccacatgtacaagcactattgaaacgcgaagggttacaaactgtaaaggaagcagaacgctactttatgcatagaatgacagatgtagtaaactcactaggtaaaactttagtcggttgggatgaacttctcgacttgaatgtaaagcaagataatactatcattatgtggtggaggcatgataaacccgattacctgcgcaaatcactgaccaaaggatattcgactatcatgtgtccgcgcaaaccgctttattttgacttcgtacaatataaagaccacaaatggggacgaatctgggacggattctgcccaatagaagatgtatatgctttccccgacaaatggtttgccgaatggggagtgtcagcctctgacctctcacatgtcaaaggcatacaggccaatacatggacggaactaatgcatactaaagatcgggtagatttcatgatctttccccgcctctgcgcactggcagaatcagcttggtccgcaccgacagtcaaagactacgacaagttcctgtcacgtatggaagatgcattcaccttatttgataagctgaatatttattactttgattatcgtaatcctcagcaccatccggaaccggctggtcctgtcatcaaaaagaaagaaaaaatacaaatggatttccgtgactaaaaaaagaaatgctacatgaagattcttatctactttttaataattgtactgtggagcatcaatatggaggcaaaagtcaaattgcctccactacttagtgacaatatggtcttacagcaaaaaagcaatgtacgaatctggggaaaagcgactccaaattctactgttgtagtaactccttcatgggcaaataaggaagtcaaaacccatgctgacgaaaaggggtgttgggaattacagatcacaacgcctgctgccagtttcgaagaatatacattaacactgacggatggagagcaatctgtcactttgcagcacctcctgatcggagaagtctggttatgtgccggacaatcaaatatggtaatgcctttgaacggatttgattattgtcccataagcgactccaataatgtcatagcagatgctcccaatcatccgggaatacgaatggtaaccataaagccgacagtaaaactatctccgcaggagtatgcagaaggaagctggcagcaaccaactacggaaaatgctccgaagtttagtgcagccgcctatcattatgcattaactttacaacggaccttgcagattcctataggagttatcacctgtgcatggggaggctcaagagtagaaggttggctacctaaggaaatactacaaacctacaaggatgaagacctgactttaataggaagtgacaagacaccagtctatttacaatcgatgttaatgtataatggaattttatacccctgtcacaaatatacaataaaaggttttatctggtatcaaggagaaagtaatgtaagaagtagcagaacatacgccgaacgcctagctacgatggtaaaacattggcgatcaatatggaaacaaggagacctgcctttctactatgttgagacagtcccatttgcctgtgaatataaagaagatggctacataggagcattattgcgggaagctcaacaaaaggcgctttcactcattcccaatagtggtatgatcggaacaaacgacttagtagagacatacgaagctcctcaagtgcatcctcacaataaaaaagggattggagaacgcctcgcatatatgtccttgaataagacatacggatatcagggaatagaatccgaatatccatcttataaaagcatgaaaatcaacggagagacaattgaaatctccttttcccatgcagaaaaaggattaagcccctggatgaatatctccggatttgagattgcaggttcagataaagtcttttatccggcagaggcctctttaaatcagaaggatcatacagtaattgtcaaatccccaacagtcaaatctcccgttgccgttcgttactgttttcggaatttcctgaaaggaaatctgattaatacacgcaatctgccggtcagaccatttcgcacagataagtggtaataaaaacataaaataaatgatgaaaagaatatattatacatatccggttttattagtctggcttgtgtcgacattgttgccacaattttgtatagctatgcctaatgaacagaaagaaaacaatgatgtggtcatagagaacgcggaaatgcgtctacttattagcaatgacggaaaagcacgcagcctgatacacaaagctacgggagaggaatgtctgataacaaatgcagatgtacctttatgcgctattacccaataccgtccttacgataatgaaaacttcctaatgtttcctgcaaagccacgcaccttcccagccaataaaattgaacgtaacggaaatgaattacgtatagaatttcaggatacctatgacattgccattatagagttaaatatcacagattattatataggtttcactctgaagcaaattgattatcgtatcgaagattttggggtaaaacgcaaaactgaaatagatgaaatctcattattacaattaccagtacgtaaacgtgagaactttggtgagtggctgaatgtatcatgggatgaacagacagccatatgcctgctaggcacccatccgaccacctatatcgatgcttttgcaaacaaggaatatactacgatgtatgcaggacttgattttcaagtgaaactattcaattccggtgcagcactgattactacttcaaaagaaaaactgctaacctgtattgataaagtagaacgtgactatcatatgcctttaggagtagaaagccgccaacgtaaagaatatcagtactcctattatgagctacgtgatgtcacgactaaaaatatagatgaacatattgcatatgctcaaaaaggtggcttcaaatccattgtcgtctattatgttgatttcgccaaagcttgcgggcactatgaatggagaaaagaatatccgaatggaatgaaagatttgcaggaaatcactaataaaatcaaagcagcaggcatgatacccggcattcatattcattattccaaagtagcagtgaatgacccatatatcaacaacggcataccggactcccgcaccaaccatgtacgcgaatttattctctcggaaccattagatgattcaagtactatcatcactatagaaggtaatccggaaggcgtacgtatggagaaaggacgacgtctcctgcaaattgacaacgagcttgtcacttatgaaaactataccaccgagcctccatatcaatttacgggatgtgtacggggagtatttaactcaaaagcagcctcccatgccaaaggacaacatttcaggctattggatgtagatgactggcccctgtttatccgtgtcaaccaaaatacaggaatccaaaaagagattgccgaacgtttaggaaaaatctaccacgaagcaggctttcgttttgtctattttgatggtgcggaagatgtaccgatgccttattggtataatgtctcccgctctcagatgatagtatacaacgaaatgaaaccaactccattatttgcagaaggagcattgaaatcacattatggatggcatattttaagtcgtgggaatgctttcgatatatttcctccggaacgtatccgtccggcaatgaagaagtatacacttcgatgcgctaaacagatagccaaagattttacttctgtcaatttcgggtgggtgaattacttggctcccaacgacaagacaataggcatgcaaccagacatgtatgaatatatttgcagcaaagctgtcgcatggaattctcccatatcattagttggcaatttaaaagagttacagaatcatcctcgtacggaagataacctgagagttatcaaaatgtgggaagaagcaaaacttcaaggtgtcctgacagacaaacagaaagaattactcaaaaatcccgaacaagaatatcttctgatgaaagataaaaaaggaaattatcagttatacccctatcgtcaaataaccaatgatgacgaaaagccaatccgggcattcattttccagaaagcaggaaagacttgtatcatttattggcatatgaacggtacagggcaactcactctcgatatagaaaagaacaagctgtctttgatgtatgagagtggtaaaagaatacctatccagtcagcaggaagcaaaagtatcctccccgcagcagggcgtctcatattggaaaccgctcttccacaggaggaagtaataaaattattcagaaaaagtatcgaatttattaaatagaaattattcatcctaatcttttgtatatgagaaatatgataaccggtattattagcatattatgctatctacaatgttttggaactttatcagcctcagtgactgctaaaaatgaaaatgaaaactttgtattaaaaaacaagaatgttgaattagtgtttgccaacggaaaagaattcttattcaaggaattccgcatggatggcatgaacatattgcctgtaaatggaagtacaacgcatccgtggcaactaatctaccggggtcccaacggagagaacccgaccttaatgccccgatggggcgaatataaaggaggcgagatacaaaaaactcaagatgcctcaacattaatattcacctggcaaatggtaatagatgcaggaccgacgtgtccggtacgcatattagtcacattaggtaaagatgccgaactaccggaatggcgcattgaagcagaaatgccggaaggatgggtgatcacagaatctgaatttccccgtattactgtaaacagaccagaaggagcaaaaggaattcttcctgtcggattcggaaccgaatacacaatcggtaatgaaggacaactgcaatcacgttatccttcgtgtacaggcacaatgcagttagtgctgatgcatcataaaggaggcacagtctactttgccgcacaagacaaagggggatctggcaaagtattcagaatgaaaagtgaaggaaaaagtcttgtatttattcagaacgtgacaacatcctatgcctggactcaaaacaagaagttcagcattccttgggaaacagtgatgggatttaccaaaaagggatggcaggacgctgcagtacaatggtatcgtccatttactttcgaaacactgtggggtgcaaaaactatttcagaacgtcctatagcagaatggatcaaaaacgctgatatatggctacgtccgggagaagtaaatgctgaaacaatggaagcagtacgtaaagcgatgaaatactatggaaaaggagtcggattgcattggtattattggcataatcatcgtttcgatactaaatatccggaatactttcccgaaaaagcaggattcaaagaaatgattaaagagacacaggaacttggaggatttattactccatatattaacggtcgtctatgggatccagcaacagacagctataaaacgcttaatggtaaagatgcctcttgtcgcaaagctgatggtacattatatacagaagtatatagctcaaaggtattaaataccgtaacctgcccatcctcttatatttggagagatgttctgaaaggagccaacaaacagatattaactgaactaaaaacgaacggtgtatatatggatcagataggttgcgccaacagcgaaccctgctatgcaaccaaccacggacatgcacctggcggtggtgactggtggccttttgcctaccgcagtttactcaccgaaatgcgtacaaatctatacaaagagaaccaagccatgacaacagaagaaaatgcagagtgctatattgacctgtttgacatgatgttagtcgtcaattctccgcacaacagctatacaaaaatggttccgttgttcccgctcatttattctgaccgttgcatctatagcggatacacctacatcccttggcgtatcacagacggttctttgaatttcatgagcatgcgtagtctgttatggggttctcagttaggatgggtagagcccagtctgttgatgcgcccagacgctaaaagggaagctaaatttctgaaaaatctgacagatttccgccgtcaacaacatgatttattcttgggaggccgttttatacaggaaataattccaacaggtgataacccaacgcaagagatacccaactatgaaataactccggtagtattagcggcagaatgggctagtgtatcaggcgaacacgtataccttatagtaaacatgagtgaacaagaacacaaggttacactgcctaataaaaaacaaataaccgtcaaagcacttgatgcggtcagaatcagcaaataaacagtcttgtaatcaaacaataaatagtacagtataatgaaacagattatatttatagcaatattattaacatgtgccttcggagcctgctcaagtgacaatgacggcgacgaacagtctgcaagcgtacaagcaccatcagacataaccatagaaagaatgggaaaaaccaaagtattactccgttggaaagacaatagtaataatgaaaccggattcagcatcttattaagaaaagcagataccagtgaaaatatagaaatagccaaggtatccgcaaatgtcacagaatatacaatcgaaagtggtctggaagaaggaaacatatactattttggagtaagagcattctcggctacgaatacttcacgtgccatttacgagctctatcggttggtagccctcggtgacgagccaagcatcgcaatcataggaagtatcaaagcaaactcaacttgtatcagtacctcttatcaagtgacaaacatagctggacaaaccaacgtaaaatatggtttatgctggagtaccgaaaacacacccactatcaatgatcaaaagcaaaacggaccggaagttgccgaagacggaaaagtatttcaagtgattccgaataccttactcgactatggcaaatcctataaagtacgtgccttcctgacaacctctaccggtacttattacagtgcagagtcgactgtttccttggaaactgagccacaagcaatccaattgacatggaataaactgactaagtctacattgccggcagaaatcgaactgtacgaaaccaccagtaacttaaatggtagtaatttccatgcatggtacgccattggtgatctctctaccggtaaggtagaagtacgtgtccacataccatcttctcccgcaaccatcgacacgcaatctgcatcattcaatggagactgttatttattggtcaatggaggatatttctataatggcaaccatacaggaatagctgttatcaattccataaaatcgggctctgtttcagccgttcgggggtcactaaaaactggcgatacagaatacaacagtatgtataatgtgacaagaggaacattcggcgtagatgcttcaggtaagccgaatgttgtttggacaggtacggatgcttccaacaatgttttctatttcgaccgtcctttgccgtctgtcaaaggagaaaataaatacggaattgtcactaatgaaaacccgactaccgcaattaattggagtcctaaatatgctttgagtgcagggcctgtattactgaaagacaaaaaaatcccattcgattttacagagacatcaaagggcacagattactatctcagtaactatgaaatcattccgtatgacattttcggagcgaatgtaacccctgaccgtacggcaatcggttatcgtgaagatgggaaagtggtcatattcatttgtgacggacgtattaccgccagtggtggagctactttaacagaactggcacaaataatgaaaggattaggctgtgtaggagctattaatcttgacggcggaggttctaccggaatggttgtaggagacgaacacttgaatgacatgaccggaggaaaccgggcagtcgtttctacaattggattcttcaagaaaaattagcccaatccggatattcataaaagctatagcaatatacatagtaagtttctttttatgtatattgcattgcttttataaacaaccatttattatgaaaagacatatcatcattttgctcattacattcttgtgtttaccggaatatctggaagctcaattaaaatattatgatgctgccgagtttccattgtatggtaaagccacaaagaatacagaaaatcgctacgaacgattgccggattcattaaagcatgtctctcgtaaaccggtatggaatttaagcagaaactccgcaggattagcaatcagattttgttccaattcaacaacaatagccgccaaatgggagaatttgaataataacctgatgaatcacatgacacctaccggtactaaaggactcgatctatacacatgggtagacggagcatggagatttgtgaatagtgggcgccccaccggaaaagtgaatcaagctacaattatagcaaatatggaaccggtcgagcgagaatatatgctatatttacctctttatgatggagtaatttcattgtccatcggaatagacgcagaagcatctatatcagtacctcgaacggcaattccagtacggactaaaccaatcgttttttatggaacaagcattcttcaaggtggctgtgccaatcgtcctgggatggcacataccaatattatttcccgccgtctcaatcgagaaatcgtcaatttgggattcagtggaaatgcacttttagactacgaaatagccgaagtaatgtcctcagtagatgcaggagtgtatgtactagacttcgtccctaatgcttcctccgatcagatatatgagaagatggaaaccttctatcgcatacttcgggataagcatccacgcactccgattatatttattgaggaccccgtattcactcatgctctgttcgacaagaaaatagctatcgaaataaacaaaaagaataaagccgtcaacagtgtcttcaaatctctaaaaacaaaaggtgaaaagaatatatacataatttcttccgaaaagatgcttggagaagatggagaagcaacagtagacggtattcatttcacagacttaggaatgatgagatatgcagaccttgtttgtccggttataaagaaagtattaaaaaaataatttactatgcagtacattaagcagataatgttattggttatactaacgattagttggaaatgccaggcagaagaagtaaaagaaatttggctggacgagttaggcgaaagttcttattacatacaggattggggactcccccgaatcaacaaagcagtcactatgacgccattgactgtgaaaggcatcgtctatgaacgcggcataggaactcatgcaatcagccgtatgctctttgatatcggaaaaaaagccaagacgctttccggattagcaggtgcagatgacaataccccatttgcttgtaatcttcagttcaagatattaggagatcggaaagaactatggagaagcggaattatgagaaaaggagatcctgccaaacctttcaatatcgatttatcaggaatagacaaagttttattattggtagaggaatgcggagatggaatgatgtacgaccgcgctgattggctgaatgtcaaattcacaactctcggtgacgtacagcccattcctgtatggcccaagcccattgccaaagaaaaatacatattgactccacaaagtccggacgctccacaaatcaataacccactgacttatggcgctcgtcccggcaatccttttctcatgccaattatggttagcggcaaacgacctatgacctataaagccaaaggacttccgaaaggattaaagttaaaccggaaaacaggactcatcaccggaagcacgaatacaaatggtaactttaaggtccgcctacaagcgacaaatgagaaaggaacagatgaaaaggagatcacactgaaaataggtagcgagattatgcttactcctcctatgggctggaatagctggaactgctggcgatttgcagctgatgaccaaaaggtacgtgatgctgcccgaatcatgcacgaaaagcttcaggcctacggatggacttatgtgaacatagatgacggatgggaagccgatgaacgtacacccgaaggtgaactcccggctaacgaaaaatttccggactttaagacacttactgactacattcactcgttagggctgaaattcggaatctactcttcaccaggttggacgacctgcggcaggcatataggcagctgtcagcacgaattgacagatgcaaaaacttgggaaaagtggggagtagactatttgaaatacgattattgcggttatgctgccattgagaagaactcggaagagaaaacgattcaagaaccatttatcgtcatgcgcaacgctttagatcagataaaacgggatatcgtatattgtgtcggatacggagctcccaatgtatggaactggggagcggaagccggaggtaatttgtggcgaacaacccgtgatatcaacgaccaatggaatattgtaatggcaatcggatgtttccaggatgtttgcgcatacgtatcagcacctggaaaatataacgatccggatatgttggtagtaggcaaattaggaccgggatggggtgcaaaatcccacgattcggacttaaccgctgacgaacaatatgcacatatctccctatggtccatcctttccgccccattattgcttggttgtgacatgactgccatagacgatttcacgttaggtcttctgaccaatccggaagtgattgcagtcaatcaggacccactggtagcccctgctactaagctcacagttcccaacggacaaatatggtataaaaagttatacgatggttcctatgcactcggcttcttccagatggatccctacttcattttatgggatcaggataaagcagtaaatatccagcaacaaaaatataactttaactttgcccttaatcagttgggcatccaaggtaaagtcaaaatcagagacttatggagacaaaaaaacttaggaatattcagtggtagttatgaaacttccatcccctaccacggtgtctccctaattaaaataacacctataaaataaaagcaaatatgaaacgtattctatttattctctttctctgttgtataggtagtggtcttgctgcttgccaagacgaagaccacacggtccctaccctcccatccgggaatgatccggaaataaacgatccagtcgtagaattctatgattgggaaaagaaccgcaccgagttactgacatctacagatatggtgttactttatggcggaggacatcatcgcactccctatacatgggataaagaacgtgtaagttcttatatcagatatgtagataccgacaatcaatcccactggctattcgacagcttcctctttttggaaattatggacacaggtacaggaggcgctaataaaatgttcgccaaagggtacaatctggaatcagccaatcaagcagactggacgaaacttatagactattacttccaatctgaaacaggaatcggagcattagatgcatcagtcaaagaggcctctgccattttgggaaccccacggcagaaacgtcagattgtgatcagtataccagagcccattgtctaccaacacccggaacaagcatcctcatcaaccaagtattgggggaaaattgataaccagacgcttgacttttccaactctgccgaccgaattaaagcctgcaaatggtatatcgatcaggtacgtgccaagttcaatgaaaagaactatcaacatgtagaattagcgggattttattggcttgccgagaaagcgaccgacacccgtgacattttaaatgcggttgccatctacctgaataaactaaaatatagtttcaactggatcccctattatggagcagatggatataatcagtggaaatcactaggatttaattatgcttatttccagcctaattatttcttcaacgaatccgtccccgattctcgtctggaagatgcctgccagaaagcactcacgtatgatatgcacatggaactggaatttgatgacaatgctctgaatagcagaggaaaggcttatcgtttgaaaaactatatgagtgcattcaagaaacatggcatatgggagaaaaaacgccttgcctattatcagggaagtgcatccctacttacactaaaaaaatcagggaacgcagccgatacccaactctatcatgagttctgcaattttgtcatcagccgccccatccggagttcacattagtataaacagtttaatcatcgccattctatgaatcataaatacctatacttactcctgctatttttgatagtcagttgccaacgcaatgtagaaacaggccctcctgtattaaaagaaatgtgccaaagattatttccccggcatgcccagtcgtttctattcgagttactgacagattctattgatacagaccgttttatactggaatcgagtcaagggaaaatacggataaaaggaaacaatcgtaactcattggctgccggtttgaatcattatctgaaaaactactgtcatacccatgtttcctggtatgcctcagagacagtggaaatgcctgatgtactaccggagatacctcagccagtatatatccgttccaaatgtgacaatcgtttttttctcaactattgtacattcggttatactatgccctattggaaatggcaggactgggaacgactgatagactggatggcattaaacggagtcaccatgcctcttgctattaccggacaagaatccatttggtacaaagtatggacagacatgggtttgagcgacgaacaggttcgctcatactttacagggccagcccatcttccctggcatcggatgtccaatgtcgattactggcaaagtccactacctcaatcctggctaaaggatcaggaggaattacaaaaacgtattctcgaaagagaacgtgagtttgatatgactcctgtattaccagcatttgccggtcatgtaccagccgaattaaaaacaatttatccgaatgcaaaaatctatcagatgagtcagtggggcggcttcgatgaaaaataccgcagtcattttatcgatccgatggactcattatactcaatcattcagcgccgtttcctggaggaacaaaccaaagtatatggtactgaccatatttatggaatcgatcctttcaatgaagtcgactctcctgactggagcgaggattttttagccaatgtctcaagcaagatttacgagtcgattcatcaggtagactcagcagcccaatggttacaaatgacctggatgttcttctatgacaaaaagaaatggactcaaccccgtatccgttcctttctaaaagcagtaccggataacaaactgatattactcgattactattgcgatcatacagaaatctggcgaaatactgaaaaatattacgggaatccctatatttggtgttatctgggtaattttggcggcaatacgatgatagcaggcaatctgaatgatattgatttcaagattaaacgactcttcaaggagggaggagacaatgtctatggcttgggagcaactcttgaaggctttgatgtaaaccctcttatgtacgaatttgtttttgaccaggcatgggattatcctgtcactaccgaccaatggataaccaactggtccatgtgcagaggaggaaatcaggatgccaatatcatcaaagcgtggagagccttgcatcagaaaatttataccgaacatgccacatgcggccaatcggtattaatgaacgcacgccccagactaacgggaactaaaagttggaatacaaaccccggcatacattacgcaaataacgacttatggcaaatatggaaagagctactaaaagcccggaacatcaacaatagtgattttcgctttgacgtaatcaatatcggaagacaagtattaggaaacttgttctccgaatatagagatcagtttaccgcttgctataaccggaaagatacaacaggcatgagagaatggagtacccgtatggacaacctcttgcttgacgtagaccgcctcctttcctgtgacgcgactctatccatcgggaaatggttacaagacgccagaaactgtggtgcaaccgtgtcggaaaaggattactatgaagaaaatgcacgctgtatcctgaccgtatgggggcaacaggacacccaactgaatgactatgccaatcgaggctggggcggacttacccgaagcttctaccgggaacgttggaaacgtttcacagacggagtcatcgctgctgtttcggaagataaaccttttgacgaagacaaattccaccaggacattacgcaatttgaatacaactggacattacagaaagactctttccctattgtttcagaggaagacccgattcaaatagcagacagtcttatcttaaaatacgatacgtactttaccaaagcacaataatgaaggcggacattcgacaaacaggcgcttcaaaagatacgttttttgaatgtagcttttcgtttttcacagagaagaaagaaatcgaatgtactacctttgttttatcaattatataaatacatactataaaagaccaatttatgggaaacaatcaaccttcggcaagaaaaaaaacttattatatatctctggctattctagccggtatgttcttcatattcggattcgtatcatgggtcaattccatactgattccatacttccgtatttcttgcgagcttacccattttgaatcctattttgtagcctttgctttctatatagcatactttgtcatggccattccttcgggcattctattgaagaaagtaggatttaaaaaaggaatcatgtatggctttatgctgactgctttgggagcctttatctttgtcccggcagctctggcacggcaatttgaaatattcctcatcggcttgttttctattggcaccggcctggctattttgcagacagccgccaatccttatgtcaccattatcggcccgatagatagtgcagcacgacgtatcagcatcatgggaatctgcaataaagtggcaggaattatctccccgctcatattcgctgcccttattctgaaagcaaacgacagtgaactctttgcattaattgaatccggtgcactggacgaagcaacaaagaacgccatgctcaatgaattgatacaacgtgtcattatcccatacattattctgggcatcatcttactgctgacaggtatcggtatccgctactccgtattaccggaaataaatactgacgagcagaatgccactgatgaacaggacaataaacatactgacaaaaaaagcattctcgactttccatacctcatattaggtgcattggccattttctttcatgtaggtacacaggttatagccattgacactataatcaattacgccaactctatggggatggatttactggaagcaaaagtattcccttcttacacactgggatgcacaatgataggatatatacttggtatcatccttatccctaaatacatttcccagaaaaatgcactgatagggtgtacattactaggtttggctctctcattcggagtggtatgggcagacttcgatatgacattattcggtcatcaagccaatgcttccatcttctttctgaatgctttaggttttcccaacgctctgatctatgcaggaatatggcctctttccattcatgggttaggcaaattcaccaaaaccggttcctctctgctgattatgggattatgcggcaatgccatcttacctttggtatatggtcactttgccgaccagtacagtttgcgtatcggttactgggtacttattccttgctttatctatctggtattctttgccatcaaagggcataaaatcaactcctggagataaaactgaacgtaagacattaaaaattaaaaaaatggaaagactgattattatcaatggggaactaatactccctaccggcatcgaaaccaataaaataatggtttgccggaatggtaagatagaacagattgtatcatccgaagcatatattcctcaagctgacgaccggatcatagatgccaaccaacaatatgtctccccaggatttatcgatatacatgttcacggtggcggaggtcatgactttatggatggaaccgtagaggcctttctgggagtagccgaaactcatgccagatatggaacaacagccatggtacctacaacactgaccagcacaaacgaagagctaatgacgacctttgccgtttatcaaaaagccaaaagtcttaataaaaaaggtgcccaatttatcgggctgcatctggaagggccctacttctcgcctaagcagtgtggagcccaagaccccaatcatttgaaaacgcctcatccggacgaatataacacaatactggaagcttcacaagatattgtacgatggagtattgctccggaactggcaggagcaattgaactgggggaaaagctcaatagctgtcacattctcccatccatcgcacataccgatgccatttatgaagaagtggtaaaagcatacgaagcagggtatactcatatcactcatttatattcagcgatgtcaaccatcacccgtagaaatgcctatcgctatgcaggtgtggtagaggcagcttatctgattgatggtatgacagtagaaatcattgcggacggcattcatctgcccaaacctttactacaattcgtatataagttcaagggggccgataaaacagcactttgcacagatgccatgcgaggtgcgggaatgccggacggtgaatccatattaggcagcctgaccaacggtcagaaagttattattgaagacggagtagccaagcttcccgaccgttcggcatttgccggaagcgtagctaccgccgatcgtttggtaagaaccatgataaatatagccggcatacccctaatcgatgctatccgaatgataacccttacccccgcccgcattctgcatgtggattcccaaaagggttctttggaggaaggtaaagatgccgacatcgtcatcttcgacaatcaaattaacgtaacaacaactatatcaaaaggccatgttatctacaatcaatgaaacatacctgtttcaacaagatctattaacagtcaaaatgttcccttctatccaacagatggggaaatgtgctgcgacagaagttactaacaaaatatgcgaacttctcaaagagaaagctgaaatcaatatgatttttgccgcagctccttcacaaaatgaattcttaagtcatcttattcacagtaaacagattgactggagcagaatcaacgctttccacatggatgaatacatcggcattcatccggaagccccacaaagtttcggaaattttctccgtcagcgcatcttcgacaaagtcccgttcaagactgtaaactatctgaacggacaagcagaaaaccttgaagaagaatgcaaacgttattccgaattgctgcttcgtcatcctgtcgatattgtctgtctgggaattggagaaaacggtcatattgcattcaatgatccggatgtagccaatttcaacgactcccatttagttaaagtagtagaactcgacccgatatgtcgccagcaacaagtgaatgaaaaatgctttgaagcattcgaccttgttcctgctaaagcactgactcttaccattccagccttattaaaagcggactggatgttctgcattgtgccttttaaaaataaagccaatgcagtatacaacactctttatggagaaatttccgaaaaatgtccggccagtatattacgcaaaaaagaaaattcttgtttatatttggatcctgaaagtgcagaacgaataaacttataaatacatatgaaaaatatcttatttatcctccttgctttcttgtctgtcagcttcagactatatgcgcaggatgtaattaaaataggaattatcgggctcgatacttcccattctacagctttcaccgagctactgaacggagactctgacgataagtttgtcaaagagttcgaagtcgtagcagcttacccttatggttcaaagactatccagtccagttacgaacgaattcccggatatatagaagaggtcaagaaacacggtgtggagattacatcttccatagcggaattgcttgacaaggtagattgcgtcatgcttgaaacaaacgacggtagaatccacctcgaacaagcaatggaagtattcaaatccggaaaaatatgctatatcgacaagcctattggagcgacattgggacaagctattgccatttacgaaatggcggagaaatacaatgtgcctatcttttcttcttctgcactcagatattctccacagaatcaaaagctgagaaacggagagttcggcaaaattctgggagctgactgttattctcctcacaaggtagaaccgactcaccccgatttcggtttttatggcattcacggagtagaaacgctttatactcttatgggaaccggttgcgagtcagtcaaccgtatgtcttcccaagatgctgatgtagtggtaggccgttggaaagacgggcggataggtactttcaggggaatcaaagaaggtccggccatttatggcggtacagcttatacccccaaaggtgcaatagcagcaggaggatatgaaggttacaaagttttgctcgatcaaatactcacttttttcaagaccggagtagctccgatttcgaaagaagaaacaattgagatattcacttttatgaaagcttccaatatgagcaaagagcagaacggcaaaatcgttaccatggaggaggcataccgaaaagggctgaaagatgcacagaagctaattaaaacctacaaataaaaatagcacatgaggtacacatacagacacatcgggatcctgaccatctcattaatagttgcttcctgctccttttccaaaaagcaggcaaacaacagtcatgacaaaaatatgaatccgaacgtaaaaatagtggtcctcgacccaggacattttcatgccagtctgttgcaaaagaatccgctggcctcagtgaacgacacaattcgggtatatgctcccgaaggagcggaagtcaaacaatatctgaacgacataaatagctataatcaacgggcggagaatcccacatcctggaaagaagaaatatatattgggggcgattatctttccaggatgctttccgaccgtcaaggagatgtagtcgtgcttgccggaaacaaccagaaaaaaacaaactatattctggaagctatcaaagcaggatacaatgtgctttccgacaagcctttggccattaacaagaaggatttcgacttactgattcaagcatatcaattggcaaaggaaaggaaattactcctttacgacttgatgactgaacgatatgacatcctgaatatcatcgaaaaatcattactgaacaatccggatctttttggtgaattgcaaaaagggtctttgaatgatccgtcagtttctatggaaagtgttcatcatttctttaagaatgtatcaggcaagccactgattcgtccggtatggtattatgacacagagcaacaaggagaaggtattgcagatgtaaccactcatcttatcgatctggtcaactggcaatgtttccccaacgaaaccatccgttatcagtcggatgtagaagtattgaaagccagacattggcctacccgcattacattacctgaattttcgcaatcgacgcaggctgacaccttccccgccttcttaaacaaatatatcaataataatgtgctggaagttttagcgaatggtagcctaaattacacagtaaaggggattcatataggtatgaaggttatctggaattacactcctccaagtgatggtggcgacacttttacctcccttaagaaaggaagtaaggctacattgaaaacaattcaggacaaagaaagtggttttgtgaaacagctctacatccaaaaagccgcagagtctgatcactccgaatttgagagccagttgcaaaaggccatcaaacaactgcaggcgacctatccgttcctatccgtcaaaaaaatgaatgaaggactttatctgattgatataccacaggcggacaggctgggacatgaagctcacttcagtaaagtagcagaagcattccttggctatttgcatgataaaaatatgccggaatgggaaaacgagaatacaatatctaaatattatattaccactacagctgtagagctggcaaagaaagagaaataagaaaggccgcagacacgtgttaagaagtgaaataaaatattatgcagatgaatccatgtttcatggattcattcctcatgttatggggacacgtcttgatatcctgatgattcactccaaccttcccctactaaacatgctttgggcacatattaccgacgagttagaaaggttggataagatgttgaatcgatttgatgccacaagtgaagtatcaaagctaaacagccatacacaacaagattcagtttctgtcagtgcggaattggaagatatcctacggtcatgccaatattattatgaaaagactcttcatcttttcgacatcacattaaacgatttctcacaaatacaaattcacggcaatcaccatatctcttttagcaacttttccgtaacacttgattttggaggtttcgcgaagggatacgccttaaaaaagattcaagaaatcctcttgcggggaaatatagagaatgctttcgtcgattttggcaacagttcgattatgggaataggacaccatccttatggagactgctggaaagtcagtttgcagaatccttacactcaacaaactcttgacgaattctgccttactgacaatacgttgtccacttccgggaatacggaacagtacaccggacatattataaatccgcttacaggaatctacaacgaacaaaaaaaagttacgagtatcttatcagacaatccgctggatgcagaaatactcagtacagtctggatgattgccgacgaccaacaacgggaacagatcaacgagaacttcaaacatataaaaggaactatatatactctataaaatatgagaaacaaaatagaaaaaggagtcgatttgaatctcagacaattcatcaaaagtctgggatatatcgcaggaggaactgcactgctggcaagcacaccctggctgtcttcctgcacacccgaaaaacttaaagaaatccgcaacgagaaagcccggatcgctttgatcggtactggttccaggggacagtatcatatccacaatctaaaagagattccccatgcccggattgttgccgtttgtgacaattatgctcctaacctccaacaagcagtagagttatgtccgggtgccaaagcatacactgactaccggaagcttttggaatcggcagatattgacggcgtaattatctctactccgttgaactggcatgctcccattgtactggatgccctggcagccggcaaacacgtattctgtgaaaaagccatggcacggactttagacgaatgcaaagctatatatgatgcctatcaaacgaccaaccaggttctctacttctgtatgcagcgcatgtatgacgagaagtatatcaaaggaatgcaaatgattcattccggactcatcggagatgtggtaggaatgcgctgccattggttcagaaatgcagactggcgccgtcccgtcccctcaccggaactggaacataaaatcaactggcgattgtacaaagaaagctcaggcggattaatgaccgaactggcctgtcaccaactggaagtatgcaactgggcagctaaaagaatgccggtaagcatcatcggtatgggtgacatcgtctactggaaagacggtcgcgaagtatacgatagcgtaaatgtgacttaccgatactccgacggaaccaagattgcctacgaatcgttgatttccaataaattcaacggtatggaagaccagatcctcgggcacaaaggtactatggaaatggcaaaaggtatctattatctggaagaggaccattcaacatcgggcatccggcaacttatcggacaggttaaggataaagtattcgctgctatcccgacagccggacccagttggagaccggaaacaaaaatggaatacacgccacattttgttattgaaggagacattaacgtcaacaacgggctgagcatgatcggagccgacaaagatggttccgatatcattctctcttctttctgccaatcatgtatcactggagaaaaagcacaaaatgtggtagaagaagcctattgctccaccgtactttgcctgcttggcaatcaagcaatggaggaagagcgacatatccttttccccgacgaatataaaataccatatatgaaattttaaattatgaaagatatcatcatcacctcccaaaaaattaaaagggaaagaaacatttatctgatatgctttcttctctcttttgcaatcaatattattgcaatccttgtctatacacgtccgtggattgaaatattcactcaactggggtatgtgctcgttatcagttttttcatctatttcatactatggattccgcgtatactcattatcgggttacgtcatctccttcgaaaaaagaagtaacagctttacgttttttgaagattgattgacggcaaagaagtctgatatcagttaataacggcttaactttgaggaaaaataaacactatgacaacaagaagagattttatcaaaaaaacagttgcaggcacggccgccctttccttgggaagcattattcccggcttcggttcaaatagttatcaggaaatcctgggtgcgaacgaaaaaatacgaatcggagtcattggtgtaaactccagaggtaatgccttggcacaaggatttgccaagatgaaaggttgtgaagttacttacctttgtgatgttgattcaagagcacttgaaagatgtcaggcagatattcataaaataagcggacgcactcctaaaggagaaaaagatatccgcaaaatgctggaatcggatgattttgaggcagtagtcattgccacgcctgaccactggcatgccaaagcagccattatggctatgcaagcaggaaagcatgtttatctggagaaaccgaccagccacaatccggcagagaatgaaatgttagtcagggcgacgcttaaatataaccggattgtccaagtcggcaaccagcgccgttcgtggccgaacgttatcaaagcaatagaagagattaagtctggggcaatcgggaaagtgagatatgccaagtcctggtatgtcaacaaccgtccttccatcggcacaggaaaagtggttcctgtacccgactatctggactgggatttatggcaaggccctgcaccacgggtgcccaattttaaagataattatattcattataactggcactggttctggaactggggtaccggtgaagcattgaataacggaactcatttcgttgatatcctccgttgggggctgggcgttgattatccgacaaaggtagattctgtcggaggacgttatcgctttcaagacgactggcaaactccggatacacaactcatcactttccagttcggcgacgaagcatcctgctcttgggaaggacgtagttgcaacagcacaccggtagacggatacggagtaggtaccgctttctacggagaaacaggcacccttttcatcagtggaggcaatgagtacaaaataacagacttacaagggaaagtaatcaaagatgtaaaaagtaacttgaagtttgaaactggtaatttgctaaatccatcggaaaagctggatgcttatcacttcgaaaactggtttgacgccatccgcaaagacggtaagctaaattccggcattgtagatgcctgcatcagtactcagttagtacagttaggcaatatcgcacagcgtgtaggtcattctttagatattgatccgggaagcggacgtattctgaacgatctggaagctaacaagctctggggcagagaatacgaaaaaggttgggaaatacgggtataaccccgcccttctcttcctcgttttttcattaggttatagttttgttggagggtatgtcaaaagtaactaaactcccctccttcgggaaggaggggtggctgaaagccggggtggtaggtgtactttacaattgaatatcaatagtttatgtattcacctaccacctccccctacggggactcctccttcctgaaggaggagaattttgttactattgactctgacacacgctccttctttgtatcataaagcgaacaaagtttatgttatcatatttcaccatataagcgcatccgtggtagagatactgcaacaccccggccaagctcccatgaaaaacttcaaccttttatttataaaccagacaaacgtttctaataaattcctgcatcgtttattataaacgtccccccagtttattataaactcaaattccccttttcaaagattaatctttaattttatgcaacaaaaaaggctgcaaacccgctaagagttcgcagcccatcaatgataaatgagtctcacagagtctgttttctcagacttccgttctttatattgtcagtatatcataccaaattaaaggcatatacttcctatcagatacagcaaaaaacaattcttttttcatttgttcaggttttaattaaagctggatagccgactacaaatatacaacataaaaagggctttgtcaagtcttcgggaagtttacacaagaaaacaaaggattactgaagctgtcagcatcataaaaaacgtgagttcttttcgtcctcatattgaatttatttcgtatttttgcgtgcacatcctcctttttttgatggatagaagaaaatttgttgttaaagcaaagcgaagattgatatatgagtgacgaaatcaacgagataacggaaggacattcagactacaaaccggcggacgcgcgggacgaaaacgtaaagcatcagttaacaggcatgtaccagaattggtttctggactatgcttcttatgtgattctggaacgtgccgttccccacatcaatgacggtttgaagcctgtacaacgacgtattctacattccatgaagcgtctggacgacgggcggtataacaaagtggcaaatattgtgggacacaccatgcagttccatccgcacggtgatgcttctatcggcgatgcactggtacagctggggcagaaagacctgctgatagactgtcagggtaactggggtaatatactcaccggtgacggtgcggcagctccccgttatatcgaggcacgcctttccaagtttgcgctggacatcgtattcaatccaaagacgaccgaatggaagctgtcttacgacggcagaaacaaggaaccggtcaccctccccgtgaagttcccgctattgctggcacagggagtggaaggtatcgccgtcggactttcatccaagatattacctcacaacttcaatgaactttgcgacgcctccatcagctatctgcatggagaatcgttccagctatatcccgacttccagacaggcggttccatcgacgtagccaaatacaatgacggagaacgcggcggagcggtaaaagtacgcgccaagatcaacaagctggacaacaagacactcgccatcacggagattccgtatggcaagaccacctctaccgtcatcgactccatcctgaaagctgttgacaaaggaaaaatcaagatacgcaaagtagacgataatacagccgccaacgtagagatactggtacacctggcacccggaacttcatcggacaaaacgatcgacgcactgtacgcctttaccgactgcgaggtaagcatctcacccaactgctgtgtgattgatgacagcaagcctcacttcctcaccgttagcaaggtactgaaaaagtcggcagacaacacactgggactgctgaaacaggaactggaaatcaagaaaggggaaatactggaatcactccatttcgcttccctcgaaaaaatatttatcgaagaacgaatctataaggacaaagagttcgagcaatccaaagacatggacgccgcctgcgcacatatcgacgaccgcctgactcctttctacccgagctttatccgtgaagtgaccaaagaggatattctcaaactgatggaaatcaagatggggcgcatcctgaagttcaacaccgacaaagccgatgaactgatcgcccgtatgaaagaagagatcgccgaaatcgacgatcacctcgctcacatcgtggactataccgtaaactggtatcagatgctgaaaagcaaatacggaaagaacttcccgcgccgcaccgaactgcgcaacttcgacaccatcgaagccgccaaagtggtagaggccaacgagaaactctacatcaaccgtgatgaaggatttatcggaacagcactgaagaaggatgaattcgtagccaactgttcggatatcgatgacgtgatcgtcttcttccgggatggtaaatatatcgtcactccggtagccgacaagaagtttgtgggcaaaaacattctttacgtcaatgtattcaagaagaatgacaaacgcaccatctacaatatcacttaccgggacggcaaagaaggaacgacgtatatcaaacgttttgccgtgacaggtgtggtccgcgaccgtgaatacgatgtcacgcaaggaacgccggactcacgcatcacttatttcagcgccaacccgaacggagaagccgaaatcatcaaagtgacattaaagccgaacccgcgtgtaagacgcatcatcttcgaacgtgatttcagtgaaatcagcatcaagggacgtcaggcacagggagtgatcctcacccgactgccggtgcataagattaccctgaaacagaaaggaggctctaccctcggaggacgaaaagtctggttcgaccgcgatatcctgcgcctcaactacgacggacggggtgaatatctgggagaattccaaagcgacgacaccattctggtagtgctcaacaatggcgagttctacaccactaatttcgatttgagcaaccactacgaagataatgtcagcatcgtcgagaagttcgacccgaacaagatatggactgccgcgctttatgacgccgaccaacagaactatccgtatctgaaacgtttctgttttgaaggttccaaccgcaagcagaactatctgggagataacaagaatacccgtctgatcctgctgactgatgagtactatcctcgtctggaagtcatattcggcggacacgacagtttccgtgaagcgatggtaattgacgcggaagaatttattgcagtcaaaggcttcaaggcaaaaggaaagcgtatcactacttatacggtggataccatcaacgaacttgaaccgacccgtttcccggaaccgactaacgaacaaccggaacaaccggaagaagaaccggaaaatctggacccggacagcgataagagcgaaggggacatcatcgatgagattacgggacagatgaagctgttttagctaatgtatacatgcggtaaaaaatacccaatgtgccaatgaagaaaaacttattatacttagggctgacaggatacctcctgttcgccctctgcacaagattacaggcgcagaccgacagtctgcaagcacatcgctacgtaacacgtgccaccatgtacggagtcggatttaccaatgtgttcgacacctatctttcgcctcaggaatataaaggaatagatttccgtatttcccgcgagacgatccggatgacaaagttgttcgacgggaatgtttctgtgcagaacttctttcaggcagacgtcggctatacacacaaccgcgcagacaacaacaatactttctccggactcgtcaactggaactatggcctccattaccagttccgcctcaccgagaacttcaagttactggcaggaggactgtttgacgtcaacggaggatttgtctacaatctccgcaattcgaacaatccggcttctgcccgggcatacgtcaatctggacgcttcgggaatggctatctggcatttgaaaatcaagcgctatccgatggtactccgctatcaagtcaacgtgccgatgatcggacttatgttctcaccgcactacggacagtcttattacgaaatcttctcactgggcaactccagcggagttatccaatttacctctctccacaatcaaccgtctctccgtcagatgctttctgtcgatctgccgataggatataccaagatgcgtttcagttatctggcagacttgcaacaatccaatgttaacggaatcaagacacatacctactctcatgtatttatggtaggatttgtgaaagacctgtatcgggtttccaacaaaaaaggagcgaatctgcctccgtcggtgagggcgtactaggagaagtggagagtggagaatttatggacaagaactgaaagattaagaatgagaaatagaattatacaactacttttactgctctgctgcctcccgatacagacggggtgcatcggagaagatgattacgctgatgatcccgtaggaaacttcgagcaactatggaagatcattgacgaacggtattgctttctggactcgaaaggtattgactgggatgcggttcatgagaaatacagcaaactgattgtaccgggtatgtccaatgacgaccttttcgataaactcagcgagatgctctatatcctgaaagacggtcatgtcaatctttcatctgccaagcgtgtctcttattacgacgcatggtatcaggggtatccgtggaattatcgggaggatattctttaccagtattacctgggcagtgccagcaaggactactatacatcggcggggatgaagtacaaaatattcgacaataatatcggatatatccgctacgaaagtttcagttccggggtcggcgatggcaatctggatgaaatccttgtctatctggcaacctgcaacggactgattatcgatgtacgcgacaacggaggaggtaatctgactaattcttcccgcattgccgcccgatttaccaatagtaaaatcctgaccggattcatacagcataaaacgggaacaggacatagtgacttttcccaaccggaaccgatctacctggaaccttccaacagcatccgctggcagaagaaagtcgttatactgaccaaccgccgttgctacagtgcaaccaatgatttcgtcaatctgatgcgcagcatagacaatggcaagatcatccaggtcggtgaccagacaggtggcggttcgggacttcctttcacatcggaactgccgaacggatggagcatccgcttctccgccagtcctcatttcgacaaaaatatgcagccgctggaagaaggtattttgcctgatatagctatcgatatgactgaggatgaccaatctaaacatagggacacactgattgaaaaggcttttgaaatcttaagtgagtaactttgttgcctaattatttgtcaaatcagaaaatcttcctatctttgcaccgctaaacaaaaagcgacgcatgcggatgtggcgtaattggtagccgcgccagacttaggatctggtgccgtgaggcgtgtaggttcgagtcctatcatccgcacacatttatataaactagaaagccttcaagaaatatcttgggggctttttaattgattacatatatgaagaaacatcaactttgctgcatcggccatatcactttggataaggtagtcactcctcaaagcacagtctatatgcctggaggcacagctttctattgttcacacgctatccgccatttcaatgacatagattatgcattagtgacagcagtcggcgctacggaaatgaaagtagtagaccagctgcgcgggataggcatcagcgtaaccgcattacccagccagcactctgtatacttcgagaacatctatggagaaaatccggatgaccgtacacaacgtgtgttggctaaagccgatcctttcaccgcttcccagcttcaggagatagaggcggaaatttatcatcttggttcgctgttagcagatgatttttctttagaagtgattaaggagttatcccggaaaggattgatagctgtcgattcgcaaggatacctgcgtgaagtacgtgatacgcacgtatacccggtagactggactgacaagcgggaagctctgcaatatattcatttccttaaagtaaatgagcacgaaatggaagtgctcacaggactttccgatccgcatgaggccgcacgtaaactgcacgaatggggagtgaaagaagtattagtcactttaggaagtatggggtctctcatttacgacggtacggatttttatcgcattccggcttataaacccggacaagtagtagatgcaaccggctgtggagatacttatactatcggatatttgtatcaacgggtatcgggtgcgagcatcgaagaagcaggtcggtttgctgccgccatgtctacgctgaagatcgagaaatccggtcctttctgtggaaataaggaagatgttattcgatgtatggagactgcggagcagatgtactaaaagagagccatacaggcgttaatatcaataagcagagcgctgttttatcttgaaaaaggatgaaacagcgctctgtttattaactacttttttctcctgttcttaataagttgccctagaaaaacaccactcattgtgaaaatcattgcaatggaagccgagaaccaacgactactttccgtacataaaagaatggtaaagagtcccaataatagaacaaagaataatgccaatttaatattacctttcatgtatcttcgaacgtttaaatttaacaatcaggaaatagacactttgaaagaagacgccaataaatatcattttcagaccatcaacatcaaacatacgttcacacagaactccgacaatctttaaagcacaaagtactgcaatgattaatgtgaaagcatattgtaaggcagcatttcttatctttaaatattcagcacttgtttctttacagcaccaaggaaaaagatacaccaaattaaagccaacaaaaatagataccaaagtatcatattcaaagggtactacgaatatctcatatattccccaaagaataagcagtataataatcatcacatctggcctattttttttcatgaatttcattattctatttttatttattattcagactgttcgtatacctttcagctaaaccaagctttacctcaaaagtaataaatatctttcaaggttcactctatccagctaatcttttgacctaagatgttcaatagcagaaaactagtcctaactgaaaatcaagacgtctcatatagagtctatccaatttgtttggacgtagtgtttcctttttctcatcggctgtcatttcaatcttcttaaagtctccacttaaaacagaaaagcctccgtttaccgcaaggtggtctgtcaatttatattctaccagaaagtccatattcccggccaatgcaccggaagtacatttaaattcactattacttcgaccttcatcccgataatgtagatatccggctcccaatacgcaactaattaaagttctttcggttattggaattttgaatccaagttgcggtcctaaataccaaagttctacattgtcagctacattcgtttcatcatcaagtgtataattggcagaagtaccggagagattaaactttaatccggcaacccaaaatttatcaattcgatagagtgtcttcacattacacgtcaagcctccattatattccccacgataattaacaccaaaaggtgacaagtttgacttaccgaacaatacaccttttccaccatctaccgaaataaacagtttatctccggaaaaactctgtgcaaatcctactgtaacagaaaacacaaataggaaaaataaaataagttttctcataatactatatttgaaaagtcgtatgaattgaaatattctaattatcaattcatacgactaattattttatgttttttctctagtgatatagatatacaatatagaacctaaagctagaactagattcatcagtaaaatatatgtcactttattggggttattatcaaaaaagaaataaatgcataatgaaattatgatagataataaaaacagtcctgatagaacccataatttgtcagtactagcatgaaatcgttttcttttcttaataagttgtcctatgcaaactcccgttgatgtacaaatcattgcaatagaagcagaaaaccaaatactattttctgtacataaaagaatggagaacagacctaatattaaaatataaaacaatgctaatttgatattatttctcatttactgtacatattaaataattatcaacgcaggggcaatagtttacctattgtgtctctcgctatactatcatcatctctttccatcggcttaaattctattgtatctatttgtatttccgttggagggcgagagactacacgggagctacatagccaagtttgtaacacacaccaaccaaccgccacaacaaatcccgcaccagccgtaaccattccaaaagcggttgaccataaagcaccagccaagccaagagatacattgcacccccaatttccaccacgggctgtcagatcgtcaagtccatcatatatttcaagaacattacatgtattatttcttttattaaccattgctttaaaaataggaatattgttactatcataacatgtgaacatagtttcttcaagtgcatcttcagcattttgtgcacattcaattataagacagttttcaataacaccattctctttataaaatgccattatattattagcatccattttacttcgtacaactatcatttcctccccaaaggtttggatttgtggacgcaaaatttcttgcatacctaaatcgtaattcatttcagcattattaaaagtagttcttgtttttaccgaattattcaagtaatccagtagttgttgtttcaattctaaactactcactttttcaaaagtcttattctcaataacattctgttcttctgaaagagtattttgctcatccgaacatgataagcagcaaatacaacataataaaaacataaaaaaaattgctttcataaccgattgaatttaaaggttgataaatacgttacaacaataataaataacagatcccaaaggaaattacctccttcctctaacttaatattttacaattagaaatatcgactatacagaaaaggaacacaaaaagttacttcttgtcactaagactaaaagtacatttatccattaccttattcagttcagtttcactgtacagtaaatgtaccttccaacaaacaatcattcaaaattatatgaatagtatattctcctttttcacaagaagacatatcaatcatgacaatgctagtgttgtgataagttttggaatgtacaatttcacctgtagctttattcgttacagtaatgatagcataatcttttgctctaccgaagcttacattaagaatattagagagaatagcacatttctcataagtaggttgaataggtattcccataggattagagcggctatcttttagtaaatgaatatcatttgaatttgcccatccttcaatcgcaaataagcaacaaagtaataataatagttttgctttcataatacttatttttattggttatgatacaaatgtaagggataagatttaaataaattcagatgcctggtcacaataaagttacaagataactatggatctcgactgcaagttacagaaaagttacaggaatgtcacaatccaacataaacacctatgagtcaagatattggcgtatagtcatccattcaaagaattcttctcctaacttaatcttcatgcgacttttccgacttttaaatgctccttcagaagcacgtgtacataataagattgtttctttggagcaacccaataagaaaaatacgcaatggagcaagtcttctttagttaaatcagcatattgaattttcaatttaagcataatgtcgccaaaagtttcataaatgctttcacaaatcatctgtccttcatgaatactcaaagaggtagcaacgcccatctttttctccaaagaaagaagtttctcatgggtttctgtccttcgaaacaactgaagacaaagttctaaactcggctccaacatcctcataaaatcagattcagcattaccctgatcctcaaagtccccagatagaatatctgtacgactcttcattaattgattttgtaactcaagatacttcttttttcgacgtttatcaatccaaagagaaatcgctcctccaataataaataacagcaaaagtgataagacctcaattttatatcttcccgcaattttttgctgataaaattcgatttcatattgatcagccaaacgagttatctcagctgcctttgttgtatcataaattgaatctagataataaataaaagaatcagctgccgctatagctgctggataatttttctcttctttctccaatttatataattctccataacttcctccacggttaaatatataaggagaagatttactcaaattcaaataataccgtgcagagtccatttgatggatattacgtaagatacaaccttttcgaagatattcagaaaataaattagtaccagttggtgcagaagatatagatgcagaaagatattggttagccttttgaaattcccctttttcattatgcaaaattcccaattcactcaatattatagatttataataatcttcccctatattctctgcaacatccaatgctttttgataatagaccaaagcactatccaattgatgttgaagcataaaaacataccctatccctctaacagcataaaatagaccatcatctttcttttgcttaatataaatttcatgcgctttatgatgggcgtgcatagcatccttataaagattttgttccgcataacatcccgccagattctcataaatggcccccaaataaagatactcgctctctttaggaattacctttaatgcttgcaagaaatcttttaccgccaaatccatacaccgcatgtctcgatacacacaaccccgataataataggcttgcatcttacgctcattattccaacttcttttataataatctactgcaaaccgaatcaatgaatcacttgactcatgaacatacaacttagtccttgcccgtgtcaaaaatatagcataatcagctctttcagagccggataacttttcaggatgagaaatggattcgaggagagacagggcactatcggggaactcttgcatcagtgagtctgcctgatgtaaaagagtagttgcattacctccatcatgacaagcagagagagacaaaatcaggaacaaccctataatataagaaagaagtagcttcatagttcgtttcgttttacaaatgtaaatagaataaaacaaacaagcaacaaaaagacaaataattttttcacacatcataattacaatgttaaaattgccctttctctctctttccctaatcttttttgcctttcatttgttcactttgttactttcgccggaagacggcagaataaacttcaacctaaatagtaacgaatggaaaaatttaatgcaatgaggactagacttttacaagatcttcagaagaaaaccatcaggtttaagagcatagtggcgctcacttgcttgttgctgacctccgtatccgcctttgcacaaacaaagacagtgaccggtacggtaacagatgccgccaatgaaccgctgatcggtgcatcggtgctcgtacaaggaacttccaccggaaccatcaccgatatggacggtaagtattcaatctctgtcaccccagaagacgtactggtattctcctatgtaggaatgactacacagagtgtcaaggtaggagcacagaatgtgatcaacgtcaccctgaaagaagattcgcaggtactagccgagacagtcgttatcggatacggtagcgcgaagaaaagagacttgacaggttctattaccaacgtcaaaggagaagaaattgccaacaaacctgcaacgaacccattatcttccttacaaggaaaagtggcaggtgtacaaatcgtaaactccggacgtgccggtgccgaccccgaaatccgtatccgtggtacaaactccatcaatggctacaaaccgttgtacgtggtagacggactattcaatgacaatatcaacttccttaatccggaggacatcgaatctatggagatcctgaaagacccgtcatcactggctatcttcggtgttcgcggtgcgaatggtgtcatcatcatcaccaccaagaaagccaaagaaggacagacactggttaacattaatacctctttcggtttcaagaaagtagtagataaggttgatttggtcaacggtccgcaatttcaggagctatacagcgaacagcttgccaatcagaaggacactccgttcgacttcagcggctggaacgcgaacaccaactggcaggatgagattttccagactgcattcatcaccaacaataatatcagtattaccggagcttcgccgaaacacagtttctatctgggcgtaggttactctcacgaacagggaaacatcaagcatgagaagttcagtaaagtgaccatcaatgcaagtaatgactataagatcacggactttctgaaagtcggtttccagttcaacggagcacgcacgcttccggcagactccaaacaggtgctcggcgctcttcgtgctgcccctatcgcaccggtatataataaggaatatggcttatacagtgttctgcccgaatttcaaaaagcacagatcaacaatccgatggtagacgtcgatctgaaagccaatacgactaaagccgaaaactaccgggcatcgggtaatatctatggcgaagtggacttcctgaaacatttcaacttcaaagcgatgttctccatggactatgcttccaacaacggacggacatatttgcctgtcatgaaggtgtatgacgatactgccgcaggagatgtagttacattgggaaccggcaagacagaagtcagccagttcaaggaaaatgaaacgaaagtgcagagtgactatctattgacttacaccaatagttttgatcacggcaatcataacctgaccgctacagccggctttacgacgtattacaattcactgagccgactggacggagcacgcaagcaaggtgtcggtctggtgattcctgacgatccggacaaatggtttgtcagcatcggtgatgccgcaacagctaccaacggaagtacccaatgggaacggactacggtatccatgctggcacgtgtgatctacaactacaaaggaaaatacctgttcaacggttcgttccgtcgcgatggttcttccgccttctcatacactggcaatgagtggcagaacttcttctcactaggcggcggttggttgatgaccgaagaagagttcatgaaggatatcaaatggctcgatatgttgaaaatcaaagcatcttacggtacattaggcaatcagaatctggacagggcctatcccgccgaaccgctgttgtcaaatgcttactcggctgttttcggcaagccgtccattatctatcccggttaccagctctcctatctgcccaatcccaatctgcgttgggaaaaagtagaagcttgggaagcaggtttcgaaacgaacgtgctgcgcaaccgtctgcacttcgaaggagtatattataagaaaaggaccaaagacttgcttgccgaagtgcccggtatctccggaacagtacccggcatcggcaacttgggagaaatcgaaaacatgggtgttgaaatggcagccagctggcgtgaccagatcggtgactggggatactctgtcagcgccaacctgaccaccatcaagaataaggtgaagagcctcgttcaggacggatactccattatcgccggagacaaacagcagagttacacgatggcgggctatcctatcggtttcttctacggttacaaggtggcaggcgtataccagtcgcaagccgacatcgatgcatcacccgaaaatacccttgccacagtcactcccggtgacctgaaattcgccgacgtgaacagagacggtaagattaccccggaagaccgtacaatgataggtaacccgacaccggatttcacctatggtctttctctcggagtaaactacaagaactggtcattgggcatcgatatgatgggacagcacggtaacgaaattttccgtacctgggacaattataactttgcacagttcaactatctgtcacagcgcatggaccgctggcacggagaaggtacctccaacagccagccgttgctgaactccaaacattctatcaacaacctgaattcggagtattatatcgaagacggcagcttcttccgtatccgtaacgtgcaacttgcttactcgttcgacaaggccctccttgctaaaatacgcttgcaggcactgaaagtctatgtcaacatacagaacctgaagacatggaagcacaacaccggctacacaccggaactgggaggtagcgccaccaccttcggagtagacgacggcagctaccccgtacctgctgtctacaccttcggcatcaacctgaccttctagtggcgtggcaaggtaccacacccaagtttccatgcgggtgacaaggtgccacagccaggtttccatgcggaatataactttaatgaatcaaatctataattgtatgaaactaaataaatatcttttttccacctttattgccgcctccactctgctgataagcagttgcagcgactttctggaccggagtccgcagggacaattcaccgaagacgataatcccaatgcgctggtcaacggtaaaatctacaatgtctataccatgatgcgtagtttcgacatcaccgccggtactcccgccattgctatccattatctacgctccgaagactccgagaaaggaagtatcccgagtgacggatcggatgtagccgaaatgtacgatgacttcttatacaccccgaccaacggtttgctaggttcatactggggaaagaattacgccatcatctaccagtgtaatgatatcctcgacgccattgccgagaaagagactgccggacaaacagaaaccgaagatatcatcaacaaaggggaagcttctttcttccgtgcttattgttacttcaatctagtgagagcttttggcgaagtacctttggtgacttacaagatcaacgatgcctcggaagccaacatcccgaagactaccgccgataaaatctacgagcagatcgataccgacctgaaaactgcggaagagtcattgcccgaaacatggagcaccgaatataccggacgcctgacttggggagctgcccgttcacttcatgcccgcacctatatgatgcgcagtgactgggacaacatgtacaaagcctctacagacgttatcaacaaaggtttatataatctgaaaactccgtataacgaaatattcaccgacgacggagagaacagcggcggttctatattcgaactgcaatgtaccgccactgccgcccttccacagagtgacgttatcggcagccaattctgcgaagtgcaaggcgttcgcggagccggtcagtgggacttaggctggggatggcacatggcaacccagttgatggcagacgcctacgagacaggtgacccgcgtaaaaacgccaccctgctctacttccgcaaaacggacgatgaaccgatcaccccggaaaacaccaacgaaccttatggtgaatcccccgtctctccggctatgggagcttacttcaacaaaaaagcttataccgaccccgcactgcgtaaggaatacaccaacaaaggcttttgggtgaatatccgcctgatccggtattcggatgtagtattgatggctgccgaagctgccaacgaaaagaatatccccggagaagcggtggattatctggaaatggtacgtgcacgtgccagaggcaccaatacgaatatactgcccaaaataacgaccaacgatcagggagaattgcgggaagccatccgccacgaacgccgcgtggaactcgggctggagcccgaccgtttctacgatcttgtacgttgggggatcgcctcggaagtattgcacgctgccgggaaagtaaactaccaggataagaacgcattattgcctttgcctcagtcagaaattgacaagtccaaaggagtactggtacagaatccggattattaattaatattcaaatcaaactgatagaacgatatgataaataagaaaatatttttttcacttctgctgctcgctgccggcttcctgagtgcggcagcgcagaagtcgccacaagacatggaccgcttcatcgacgcattgatgaaaaagatgacggtggaagaaaagataggtcagttgaacctacctgtcaccggagaaatcactacgggacaagccaaaagcagcgacatcgccgccaaaatcaaacggggcgaagtaggaggcttgttcaatctgaaaggagtagaaaaaatacgcgatgtgcagaaacaggcggtagaacaatcccgtctgggcatccccttgctattcggtatggatgtcattcacggatacgaaaccatgttccctatcccgctgggattatcctgcacctgggatatgaccgccatagaagaatcggcacgtatcgcagccatagaagccagtgccgacggtatctcatggacattcagcccgatggtggacatctcacgcgaccctcgttggggacgtgtttccgaaggcagcggtgaagatcccttccttggagccatgattgccgaagcgatggtactcggttatcagggaaagaacatgcaacggaatgacgaaattatggcatgcgtaaaacactttgcactgtatggcgcaggagaaggcggacgtgactacaatacggtagacatgagccgccagcggatgttcaatgaatatatgctgccttacgaagcggctgtagaagccggtgtaggtagtgtaatggcttcgttcaacgaagtagacggtgtgcccgctaccgccaacaagtggctgatgacggatgtactgcgtggtcagtgggggttcaacggatttgtggtaaccgactataccggaatctccgaaatgatcgaccacggtatcggcgacctgcaaacggtttccgcacgtgccatcaatgccggagtagacatggatatggtgagcgaaggctttgtcagcacactcaagaaatccattcaggaaggcaaagtttctatggaaacactgaatactgcctgccgccgtatcctggaagcaaaatataaactgggattgtttgacaatccctacaagtactgcgacttaaaacgtccggcacgtgatatctttacgaaagcgcaccgagacgctgcccgcagaattgccgcagaaagctttgttcttttaaagaatgacaacgtgaccctgcgtccgggaactcctgccgaacctcttcttccttttaacccgaaaggtaacatcgccgtgataggtccgttagccgacagccggacaaacatgccgggtacatggagcgtagctgccgtactcgaccgatgtccgtcactggtagaaggactgaaagagatgactgccggaaaagcaaacatcctatatgccaaagggagcaatctgatcagcgacgcctcttacgaagaacgcgccacgatgttcggacgttcgctgaaccgtgacaaccggacagacgagcaattgttgaacgaagcattgacggtagccaaccagtcggatatcatcattgcggctctcggagaatcttccgagatgagcggagaaagcagcagccgtacagacctgaacattccggatgtacagcaaaacctgctgaaggagttgcttaaaaccggaaaacctgtcgtactggtattattcacaggtcgcccgctgacgctgacttgggagcaggaacacgtacccgccattctgaacgtatggttcggaggcagcgaagctgcttatgccatcggcgacgcactcttcggatatgtcaatccgggtggaaaactgacaatgagtttcccgaagaatgtcggtcagattccactgtattatgcacataagaatacgggacgcccgctagcacaaggcaagtggttcgaaaagttccgcagcaattatctggatgtggacaatgaaccgctttacccgttcggatacggactgtcttatactaccttctcttacggtgatatcgacctaagccgttctaccatcgacatgacgggagaactgacggcagcagtaatggtcaccaataccggtacatggccgggatcggaagtagtacaactctatatccgtgacctcgtcggcagcactacccgtccggtgaaagagctgaaaggcttccagaagatattccttgaacccggacagtcggaaattgtcaagtttaagattgcgccggaaatgctgagatattacaactacgacctgcaactggtggcagaaccgggagagttcgaagtaatgatcggaacaaacagccgggacgtgaaatccgcacgattcacgctaaaataaaaatcgtacaataggcacggattacacagattcacacggtctttaactgcgaaatctcttaaaaccgtgaaatccgtgtaatccgtgcctaaattttattctctcatttaaatccacaatcaatgaaaaaattatctctctatatttcgctcctctgcctgatactgacaacaggagcctgcaaaaacaagaccggcggaccagccaccgccagttccgagctcacggacgatgccttgatggacaccgttcagcgccgcacctttctctacttttgggaaggtgccgagcccaacagcggacttgcccccgaacggtatcatgtagacggggtatatccgcagaatgatgccaatgtagtcacttccggcggcagcggcttcggcatcatggctatccttgccggaatagaccggggatacgtcacccgcgaagaaggtctggcacgaatggagcgcatcgtctccttcctcgaaaaagcggaccgttttcacggagcatatccgcactggtggtatggcgatacgggaaaggtgaaacctttcggacagaaggataacggaggtgacttggtagaaactgccttccttatgcaaggactgctcgccgtacaccagtattacatcaacggtaatgagaaagaaaaagcactggcagcacgcattgaccaaatatggaaagacgttgactggaactggtaccgcaacggtgaccaaaatgtactatactggcactggagccccacctatggctgggaaatggacttccccatacatggatacaacgaatgtatgattatgtatatcctcgccgcagcctctcctacccacggagtaccggcagccgtctatcacgatggctgggcgcagaacggagctatcgtctccccgcataaagtggaaggcatcgaactgcatctccgctatcagggcacggaagccggaccgcttttctgggcacaatactccttcctcggactcgaccccgtcggtctgaaagacgaatactgccccagctacttccacgaaatgcgcaatctgacattagtgaaccgtgcttactgcatccgcaaccccaaacactacaaaggtttcggaccggactgctggggactgaccgccagctattccgtcgacggatacgctgctcattcaccgaatgaacaggatgacaaaggggttatctctcccaccgccgccctttcatccatcgtctatacaccggaatattcgatgcaagtgatgcgccacctgtataatatgggggacaaagtcttcggtcctttcggattctacgatgctttcagcgaaacagacaactggtatccgcaacgttaccttgccatcgaccagggaccaattgcagtcatgatcgagaattaccggacagggctgttatggaaactcttcatgagtcatcccgatgtacaggcaggacttaccaagttaggtttcaataccaataagcaggatgtaaggcagaaataaagaaatcacagcgtgcgtggaagtggtctactgaccacctcctccacctgtattcccaccttcgccgccaccacctttcacatcgtcattattgatgcttcgggcagctttcttcacactagctttcagttcaccaatccggtagctgatgctgactccaaagctacgactcggccacttgctgctgctcttcgacaggaagtttacgccttccgtatgattgttatagcttctgtatttctcaaatatattactgcaatacacattcaggctcaaacgctcatctttcaggaaagaacggctcgcacccaaactataataataatagccggaaccttttccctgtagattaatataaggagtactaccaccaccattcagacttaaccgtattttcaacggaagagtatgctggacgccaccatagaaagaaccgttccatccataattgtgcaatccctgcgcttcacttttcaagtcgctgtagtttccacggccattgacgtacaggcgcgttttaggagacgcgttccagttcagatacaagctcattcctgtgttccggctctttcctatattggcataagtgctgtacaaagctccttctggtgctatgtgtgtaggatcattgtcaaacatctccccttcgggcgccgtaatcaaccggcttatattctcaatactgttattgttgaaagaatggcgcagcgacacattgatattgaacttcgcactaaaattgctataagacaagtcgaacgcatggcttttttcacttttcaggttcgagttaccttgggtgataaacatcggattcagattattaaaataaggattcagattccagatgcccggacgccagatacgcatattataaccgacacgcatgttttgagtcttgccgagcttcatgccaagagaaacggatggcaccagatcgctgaagttcgtgtgaaaattctcacccggtccaacgatatatttcacccgctgcacagtctgttcatagcgcactcccggcttgaaggtgaaatccttatatttcaatgtatatccgagataagcggctaaaatatgattcaaatgacgatagtcgctactgcggtcttcgttatataaataatcgtcacttcctccggctgcttcatatagtttgttgtcactggtattgcagcggaagatatatttcgcacctgcctccacggtatgcaactcgcctatcggagtcgtatagtccacttggaaggtctgttccatggtattcgttttgccgtccgactggctgtttttcaacagcaaccgtttcacgaggtcgtccacctcctctttggcgtgaatatcttcatagccagtattagaattgcttgtctgaggctgcgtattgatcttataggagaaagtgatcatccgctgcttgttctttctggacgtgcgctgatagtcgatgtttccattgatggaataccaggagccatctccatgattgccggtccgatagctgtaggctatgtcctcatggttagcaccatacatggtggtaaatccatcaccataatttttactattgctgccatacattccaaaagccaccgtcagcagccttaaggtgtcgatctcataactgccttccaggtttccatactggaagttgcctttcgacttggaactgctatttgattcaagatatttttccgtatccgactcatagttctcacggtagctgtccgaatatccacggggccggtcattgtaattaaagttgtaattggcagagacagtcattttcccctgcttcaccattgcgtagccgccggcaccggcaccgtagttgctggcatttgcccggaatgttgccgtatatccttcgaatccaccgcctactgttacgatattcaaaatacctcccactccttcagcgtcatatttagctccgggcgatgttatcacctcgatatatttaatagaattggcgggcatactcttcaacacctctttcgggttgttgctcatcatattgttgggcttcccgttgacgtgtattttaaagctgctgctaccattcacctgtatgttgtcttctccgtccactgtcactaaaggcacttttcgaagcatctccaatatactgtttgatttcgagtcggggtcatcctcaatattatactctatcttgtctacatccaccttgaccaaaggcttttgcgccacgacttccactcctttcaattcattattagcctcagcggagagcattgtccccaaatcaatgactctaaccgatggtttcaaagtgaactctttcgtgacgggcgccttgcctatcgaagaaatagtaatgacgtaatctcccgcacctacattcagtttctcctgaaacctaccattggcacccgtcaccgccatcttgacagccttgtccggtgctccttttttagtaatcttaatagtagcgtatggttctccatcctgagtcagtgaatccaaaagtacccctttgacagtataggacggcgtagcggagttttgtgcccaacctgtcatcactgcggtgaacacgaatagtaatagtagcaacaatctgtgtttcatgtttggaatcgttttagtttttagtttattagacgaagtttctttcaatttcttacaaatacggggtaaaagtagatggtttctttatggttacgaaatcttcggagttaagaatcgtaaaagaagagataaaaaagattatacgaaaagagaaaccgatttctaggtcatagaatggcagaggtctttcttggctgcacattataaatacatcttcaaaatcttaagaacaacggcataattgaataaaggttttctctgtagaaaataacgtcaccgcattcataaattaattcgtccggctataggcatcttttcgtccgcctatagccggacgaaaggttgcctataggcaaacgcaactttgcctatagacggacgaattaattcattcactaagagagattaagttatacactaaaaggtattatatttagaacccatattttatttgccattaatatcaagtaattcctgatatatcagagaatcgtttttcattttattgcacatccacttccatgcaggcatcaccttgatttcccttctcttgagcttgcatcaaccatataccaagcaacttgtatgaggtatgagttgtataatgtcagaaattcttgcgctgcccccccttcccatcaaagccagatgcttttatacgccatactataaattttcaaatagaagggtagccttcaccttttcttcgaaaccttttattcataagtgataacaggtgaagcatatcgcccttcaccgatccttcacccaattttcatatgtaatcataaagacatcgttcactttgctataagctaatttgtttttgctataatgatattcgtattagctataacctaataaaaagatgctaatagattatttttttcttcccaatgtttgtttcaaaccattgatagtttatttcaaacacttacaatgttttctccactcactaggtgaatagccgtcccttcacccgagatcactgataaataaaaggttgagaggaaaaagtgaaggtgaaggcgacactcgtaacatctgctgtatggttatttaaagcaatgctttagcaaccataaagcatagcttttgaagatacaaagcgttgctttacgaaggagataaatgtgctaagtgatattaatggcaaacaacaccttgaaataacatcgcctaaacacaaaaaatcattctaaataccagacttcttttatttattcccattctcccactttattccgaaaaaacatatatctttgctgtacactttctgcgcatcagcgagatgtaataagcgggtagtgttttttattccttaaataggagtattaataatgtattgtctctcgtactcgaaactagcaatttcacgcaaagagagatgatacaacagatactccacgtgaatggctgtatatcaacatatcaataagagatgtgttatatataaacgattggcgtggatgtctgttgttatcattgtcttttgcaagggtttgctaggcctcgagtacagataatggttcaacagcatccatgcctcttttgtatccggtcggttcccttacataatccccataccccataaccctccgactagaaagcaaaatgcagggatgcttgttgcaccatgcttggcaagagttattcgctcttttttgttaaacgcataaacaaagaaacactatgccgaaatggattagcatagacgaagcggcgcacaagtacggagtcaaagaagaagacatctgtttgtgggcagaaatggaagcaatcaccgcatatttcactgaaactactcttatcatagacgaaaagagccttcagagatttatatacctgcgcaagaatcttcccacaacaggatatatccgcacactagaacaactctgtatcaatcagtctgaagtgtgtaaactgtatatggaagtcattgagctacaagaaaaagaccttcaatacaaaaagcgtagaatttcagtgctggaaaggcagtatgcgatggcaaccgaacagaacaagttaagagaaaagataatcacgataacctctgatatgctaagtaaagctgaaagtggatggtgggaaaaattgtggatgaagatcagcaatagacaaaagttataaaaccattatacaactaatctatgtcttatttaaatatgagttcaataacactaagctatcagagcatattcctatataacccaaaaccttcatcccccactttaatctcctatcgataggaagaagtggaagatgaaggtctaattatatctataacaaacaagttttattctattgcagtccggtccaagcagatattgcgtacttagattctacagcattctctaagttgtccggcaaattatggaagaagtccaatcctgttaattcttccagttcgtcaattgtcctagcacattcagataatgctggctttgttgcagcgaattgatccatccaaaaacctattgccttataagtttctcccttcttgcaaagcaatgccataaaataatatttgggaacaggcttcgtcttatcattactaatatattcttttatttggctttctttatcaatggttccgcctttgacaacataaagagtatcacgaaaagtactactccgtccccaagtacggaccttcccttccaaatcataccaagtccctgctccattaaagttatatgtctgcggactcatgttagtataatagaaagtttgttcattagcgtctttcgaataaagacggtctgaagaagcacaaatatgaccacgaacataaccttgtttaccaaagtcactttgtgtccgttgatcagactgaggaactctcggatcagattgccaaggatcaccaccccattctgtttgtttccagtcattacggttccaatttgtttgtcctgttacattataatatttaaaggctatccaacgagcgtgctttttactcttgtcatactccatactataggtaataaccttttctccactaaatgttgtagtaggagatagaaatatatcatttgctccattcctcaatgccggaagttcaatattccctttccactctctctgtaaatcttcattctcatctttagaacaagatataaataatataataaataatagaaggaaagaaaaataatattttttattgcaattatattgttttttcatacaaaaaaatacagtaaagggggctatgtattagccccctcacgcatattaaaattatgttactccaatttatagctatcggttttagctacatctcttaaaccacctattccaaaataagctctaaacttacctttaatagtaagtttctttccaatattacccaaattatcttgcaaatttatagcaactcgaatatcaccggttggcaaattcaccgcaacacattttgtataatcagtctcccctttagaatctgcaatcaaaacaacagtatttttgacatcttgtcctgtccctccaaataacacatccgctgctgagctaatagttgttatcttagtatcattttttattccagcaacaatgtatcctgtagcatacgctgttggagcctctgcctgtttacttatcacttccgcgacagaaaaaggcttatcaattgttccatcagcatccccaggatctggcaaatcgcctccctgtgtatacttaatgttatccaattggtaagttggcattcctcctgtttcaggttcaataccaacatattggaatccgacaaagcctgttttgcctacataactattcagattcacctcaatgtctttcacccaaacataattagtaccagatgttgggatagaattcactactatttccgattttgtaagttttccatcagcagacttttgcaagaaataaacctttagagaaggattagctgtccaattagctccagcgcagtcaaatgttaattttttagaagcatctacaataaaagccggagttataaaccaagactcaacagaacttcctttgtctgcacctttcgtattagctctaatatatttatctgaattataagctgcacctttccaagtatatatatctggaattcccttattcacccaaccagacaaagtgtaaggttgatctttttccatatcttcaaaatcagctgtaaaacttgcttttacagctgaaacatctaagccaaatgggtcatcctctcctggagcttctccaccttcagctggtcccgctttaatattatccaatcgataacttaacgcttcagaagagctagtacttgtatatttaaatccaacaaatcctgttttaccagcttgagcactcaaatctgctgtcaatgatacccatgtattatctgttgttggcatccctgctacatttatcgcagtagaaaccatcttaccatccactaattgaaggaaataaacttccaatttagaattagcagaagcagttgcataattgtatacagcgcaatcgaaagatacttttttatccttaacttgatccacctcaaaggcaggagttgcaaaccaacattcaaacttttcaccagtaccaccataagaagtagcttgaatatatttatcggttttacctgtcgtggtattattaaatgtctttccttgccagcgtctaccaccttctacagcaacattataccaaccttccagttcataatcactatttgctaccaaatcttcaaaatcagcagagaaagtattatttttctttgaatcatccaagcctaacggattatctttatcaccaggttccgggtcaccaccatctccaatatctttaccatcaagaaccgcagcagtaggactcttaagaccagcaactccaaaatatttcgtcaactgtcccttaattacaacggctttacccaagtttccaccattgtcaaccaaatttaatgcagcacgaacatcggtttgagacactagctgtactgggatacatttcttataatctgtttcatccgcatcagcagcaatcaatatatttgcggcatttgtaaaaggaggtgcaaatacagcatcagtcgaaatactcttatcattaatgcaacctacaatatatcccatcacccaagcttctgagttatcctgtttcgtcatagcacttgctatgtcatatggattctctttcgtaccatctccagtcaaggcaggtccttcgccgtttcctcctccattgatatcataaggagcaggaacatcactacaactaaatgtgactaacgttattatagtcaagaataaagcatttagaatctttttcataatagttgaatatttattttattagttatttctttgaatatcactatatgttctagctacaatttgccatgtactattataacggctcagaatacctatcacattaattttacctgtcggcatcacttcggttgagaaattagcataagtgctggtacggaacgtcaatgttgaattatcatccaacaccaatgtacggtttactccattaccaccatccttcaaatcttcaggagcaaaagtagcagtaccatccgcttctttaattgtaacatccttgaacatcacaagtacaggcgccaagtctttatcataagctttcagctgagcgccggtaagttccatcggaataagctcgtcataccacaattgaggtttattgattactctgacatgatccaaccatacagccaggtccatacgtccaatggctcctttgtaggtagtacctatctgagcttgcattccgtatccacccacattcaagttttcacagtcaatcaccactttctgtccaacagggcaattagcatagatgccagtagagttaatacctaccacaatagctcctgtttcatcagccacaatcagctgtttgtagatatttccactttcgtcatcacctactactacaccggaaatccgagtttcttcagtaactgtctgaaactgatttgccgaaattactgaactgtatttttccttcagattagcaatcgaaatagtccgttgctcttttatagtgttattaccataagcgttccctgtcacaggcgtatcaaagtcgtccatacatgacgaaacgcctaatgtcagcaacaacgcggcagataaaataaatgttatctttttcatatcatttccttgtattaatttgcccatttatttagaatctatatccaatgttcaagaaagcattgcaagcaggagcataatagtacttagagttcttagagaaaacatatgtacgtgcttctccgtcatcatagctatcatcacggttctgctcatatccgccagtacgcaagttcgtattattaagaatattgttcacactgaggttaatgctcaggctctttccattcttcaaacgaatatatttaccaatagaagcgtcaagcatgaaaccaccattcaattcttcctgctccggtacattatagcctaccggattaccattagcatctacagcgccatcagaatactttcctaatacactacctaaacgacggtaagtagagaagtccagataaacacggtgataataatttcctgttacgttaaagaaccaacctttcacgctgtagtccagtccgaggctatatacagacaacggtgttccgttatcacgaagtcctttacaataaacgcggtcaatattagattcactttcactttcataagtacgaacagccgtaggattattcatataacgggcatcagaccacgtaccgatagctgtcaatgacagattggacatgagtttaaaagttgcagcagcttccacaccccaattttccttatcaattccgctcatagaaaggtaagtgaaacgagcttcattatcattgtagaaagcatccatttcaacctgatcattaaaacgagtataatatccagtgacacgtcctgaaacaataggagtattgaaacgataagtcaattcaccgttataaatcttctctgttctcaaaccatgtgcaaaatcgttcttgatacgaggagcgatgaatgagttatatgccaacggagcacggttctcataaccggcgttcaggatcaatgaatgattaccgttaatagaatatgtaaatccagctttcactgcaccttccaggaatttagctgtgccactgcttcccaaagatttcttaggagcacgaccattacgcatctttccatcacggctaatttgcgctgatccgatcttacctgatacgaaataattgaaatgtccatcgttatcaccctgataacgcgcccatacattttgtttatttacaaagatattatagtcataaccgaacttatcaccttcaccgatacgtctgttaggattgtccaagtcattctgaatcacataagagttataaccataatcacggacagagaacttatcaacatctgtatataaatcaccacccaacaaatccttcatcttcttatagtgcatacctttagtagtattcacagctaaaccgaccacatagctattatgctggtcaatcgtatgattgaagatcgaactgaaattgaaagctaactggtcattatgacgttcttcctgataatacaaggtctcttttcccaatgcattggcctgctgattggcaaagtacatctgatcccaatcaatttgacgagtagacttactggttttccagcgctctgttacttcattgaacagattcaactcatcttcactcggcactgtcgacttatcatatacattaaagatagaactaggcagcttcttataataatccggacgaggatcggcagcattgcccgaccatccaagtgcacttgtaccataattactatatttgaatcctgcgcttgtcttcagcttcatttctttattgatatcaaaatcccaagatgcgatagcagaaggctcgaaagagcgtacaacacgtgagttacgcttttcaccattctgataaccccagtttggattgtaatagtgactattagccagataataagcttcttctgtagaggcaccttgctgtcctctttctgtaggagccccccatgtagctatagacaagctatgtttgtcattaaagactttctctgctgccagaaaataagagaacgcattatagaatgtaccttcaataacaccttcgttagcccaacgatatccgagagaacctgtaaatgcccagccattcttcaataaacctgtagaataggtatacatacctctcagaatatagttacgattacagccggagagacttaattttgatcctgctgcatattgactggcacgcatattgatattagtagctccaccgatagggccaaaggtgaaattattaatttcaaaagcaccgataccttctttattacgtgtcgcatcgttcaatcctccaatcattccatagctgaaacgaccggtttctacatcattgaacagaacaccattaatatacgtatcgctgtactgcgaattatagcccctgacgcgaaaacgcatcgggctaaacaagtagccgacattagaaaggtacacatcattgttggaagagacaaaagcagatgcactttgagctgcatcatcatcttcattcaattgcgattcagtgaatgtgaaagaagcattatcttcacgtgcattcttttcggccttctgctgagcaaaaatagctggcgaaagacaaaacaatgcaatcactattcctaatctttgtttcataatttaaattattattagtgttaatttgtagcacgaaaattcacagttatattacagcgagagtacaaaacaacaaaaaaaaagggatattacaagaaaaaacaaagaaaaaataggtgataatacttgtttttccgttttctttttagatatttgtcaaaccaatgtaatattcagaaacctaatttatagataaataatgaaaaagtttttaacggtatggggcctgttactgtttatttcgataacaagctattcacaggagaaaaagtatgctctttacagcgtagcgttttataaccttgagaatctgttcgatacaattcatgacgcgggcaaaaacgactttgaatatttaccaaatggtaaaaataagtggaactccatgaaatatgaagcgaagctaaaaaacatgtctgaaatattaagtcagctatcgacagacaaattaccattaggaccaactattatcggtatgtcggaagttgaaaacagaagagtattggaagatctactcaaacaacctgctttatccgacagaggatacgaaattgttcattatgaaggtccggaccggcgtggtgtggactgtgcatttttctacaatccgaaattctttcacctcactgccagcaaactcgctccatatatttatgagaataatgatactacctataaaacccgtggtttccttattgccagcggtacacttgccggtgaaaaggtgcactttatcgtaaatcactggccttcacgtgcagccgcatcacccgctcgggaaagagcaggagaacaagtccgagccttaaaagattctttattaaatgaggattcaaatgcaaaggtcattatcatgggagatatgaatgatgatccaatggacaagagtatggctgttgcattaggagcaaaacgcaaagctcaagatacaaaggaacatgatttatataatccctggtgggacactttaaagaaaggtaacggtactttaatgtatgatggtaaatggaatctgtttgatcagatcgtatttacaggaaatttattaggtaatgatagaagtacactgaaatattacagaaacgaaatcttcagaagagattatatgttccaaaaagaaggaaagtacaaaggatatcccaaaagaacacatgccgggggggtatggcttaatgggtatagcgaccacctgccgaccatcatatatttaatcaaagagataaaagactaacgaacagttaacttatgaaatataaattcatccaaaccttactattagtactacttcctaccctgtttgcagcatgcggtagcgacaacaatgatccaacagataatattggcggattaactgttagtacagaccttaaaaacaatgaagtttccgcaaagggaggcagtttctttctacagataaaggcagaaggcaagtggaccgcctccagccaagatagttggtgtacgataaataacaaagaaggaaacgggaatgcctctactatctgttctgtatccgctaatgatgatgatgaacgttatactgttatcaccgtaacatccaatggaaagagtgaaaatgtaactatcactcaaaaaggaggaaatggagaagagcctgatccggatcctaatccatcgggatatgcaggaagaattgagattccaaagctaaaaggaggtaattccaatttattcattacccatactacacaatataatggaaaagaagtaataacctacagttttgaatatgattgtactcaaaaaagctcacgttgggtagcttttactttcaatacttcaacgcctgataataatgtaggtcgtgcaggagacttcagtgatgaccctagtattccatcacaatatcgaacacacgacggtgattatacaggttcggggtatagcagagggcaccttgcagcttcgtcagataggcaatattctgtagctgccaataaacaaaccttttatatgtctaacatgaatccacaaatacaaaacggattcaatggtggcatatgggcaagcctggaaggtaaagtacagtcatggggaaaaatcaccaatgatcaagacaccctttatgtagcaaaaggggggactattgacaataataatattatcaaataccttaaagcaaataatactattccagttcccaaatatttctatatggctattttatcactaaaaaatggtcaatataaagcaataggcttttggtttgagcataaatcatacagtaacagtagttatgcggcatatgctctttcaatagatgaactggaagaaaaaacaggaatcgacttcttccataatcttcccgataagattgaaaatgaagtagaacgaagttacaataagagtgattggggattataaccatacaggagagtaatcatgagattgtccgaaaggacactgtttcctatcatcttgctctgtcatcctaaacttgtcgaagaatcttttcttgcatttatcaaagaaaagattctttacttcctttttttctcatactgaaatgcacatagccgattatcaggtgtcatactgagagttccaacatttctattatgataggttactatcagtttatttactgatttcattacgccccttctttctgtttttattcttattaatcatttccaactcctccattgtactaaacagcggttcagataaaagttccttgatagctttagagtaacccagtgcttttgctaatgctacataggatgccaatgaaatagtatgcttttgttcaaacttggcaatagtaggcgtcggaactccgctaagttcggtaagagcttctcgggaaagtcctttctcaagtctgcgtttctgcagattctgagccagaattgccagcaactcttcgggtctctctacatcaaaattataaagtaaagacatacaattgtattcaattaatttaaaaatagcactattcagatactattatatctaaatacaaagatagtttctttattcaaaaaaacaaaatataagccagttctattgagtgtattcggcaacaaaaaggatgccccccttttctacaaatagaagaacagaagcaacacaagatttaccccgatcaccgtcccgaatcctcccaaaatccagggacgtaacttactacctttccctgcaaaaaacaaagcataaaacatattcaccagaatattactgataatagcctgcatactgcaagccacaacaaccagtacagctacgctccctgtattctgcaaaaggttcaagataaaaggagtaatgtcactaagtccggatacaaaagaaagcagattcaatccgcctgtacccgcataaaccaaagtatagtgcgtcagcactgtaaacacaacgaagagagtggcaaaaatcagagcaactttaaattcgagcgggttactgctgtcctcatcttccgactcatcggtcatatccttggagcgtcgatgacgggaatgtataaaccacgcaacaacggcagctaccacagacataatcaaaagataaggatagatagatgtaaatatctccctgctaaagatcagaatcaatatcataaaacgcagaaacatcatgctgaccgcaagcagcatagcagctacatattcgttcgcctcctgctcggaagcctttctgcttttacgggccaataccgaaattgtggcagtactactatacaatccaccgataatgccggaaaccaatactcccgattcatgaaacacatagcgtttcagcaagtaagacaaatacgagataccggagacaacaaccgtcgccagccaaatagaataaggagtgagattaatatccggaatcaggttcttgtgcggtaacataggcaatatgataccactgatagccaagaactttgccagcgtaatcatctcatcgttcttcatccgctgggcaaactccgtaaaagtgtgtttaagctccgtcaataaaagcaccgtcacaatcaccatcacataaaaccaggaaggctgggtagaaacaataggagccagacaataagtaatcagtgcaataataatggtcgttacaccaaaaacatggaattgagactgcttgacgtaatagttcaagcccagcaataaaccgagcacagcaccaccacccataaacagacgcatatccgtaggatcgagtatatagagcaaatagcctagaataccaatgaaagtaaatgtacggtcagtcccgaagagagttgtttccccttcacgcttcagactgatccgtcgttgtgacagtccgataagtaaagaaaataaagtaaccagaacgaaagttatcagttccctcggtagataattgtacaactgttccatatactgctcttttagtactaagaacaaatatacagcttatttgttaacattcaccacattttatacggttttttcatcaggtgagagttatagtagcgtacatccccggtcacttcttcgccaataaacccgggcttgacaaacgcctcatcttctgtgcccagctctacttcagctacaataagtccttcattctcaccgtagaactcgtcaacctcgaagatatgattgccactacgtaccagataacgggtcttatcaatcattcccggttcgcaaagtttcatcagttcttccgcttcggacaagggaagttccttttcccactcatagcgactggtacccgattcgttggaagcacctttgatagtgagataacctttatcgtcacgaatacgaacccgcaccgtccgaccacgggcgctgcaaatatatccctgcataatccggctctgcgcaaatgcaaaggatttaaaatcaccggaaactaaaaatttacgttctatttcttgtgccatagcacaaagataattaaaaatcaaaatctcgtcataaactcaataacgattttatcacgctccgactctttgggaactccggacttctgatagaaatacttctcaaagttgagacgaagatcagcaataaaggctttggaaaggctcagcgtgatgccgcctgtcacacgatgacgggcatagtcgtttatcttcaaaacacctgtctcactgtccgccagcccattactgtggtcagtcatcatatcataacgggccagaaaagaaatcttattgaatacttttttcaacggcaaatcataattcacaaagctattgaccgcatgaacgtccttaaacgcttcgtgtccatacattttatataaatactccgcttcgatatgaaaacgattattctgatagtagatgccggcatcatacatattaatacgggtatgttccggctttatcatttgagtgctcaaagtgagattccaatttttattaggcagcaactgtgcttttatcgaataattcaaggtcttatgccattccttctgattagtcagaccggagccgttaaacaatccaccttcaaggacaaaaggaagaccttctttttgtgtataacaaccggtgaagccgacatcacgcacattgcccacctgcttggctataaacgaacgattggcaaaatactgctgatggggagaacgatgggcatcgatcgtgaaaggtacacgcatctgaccaatcgtaaaattcaggtccttgacaggaaacacacgggcatacgcatcaagcatcttgatggacccctcatcggacaaatcgatctccgctttataggctacaatcggatgtacatttcccgaaacactgaagcgggcattccgcacttcaaaacggctttcgttggtttctgtctggaactcatattttccccggatcgttccatgaatttcaggcaaataatctttcagttccatgatctgcttatccagctgtttgccatccccggcatcttctttagcctgtccgcaggctgctgtcgccatcaaaagcagggcgacggttgttgtaattctactcattcagttgtttgctacttaattcgcggcaaaggtacaatgagcaggatacggagagattacaaaagagatacggtgaaattacagaaaggttacaatactgttacacggataacaaagggggtacaaaaaaagaattcaccacggactaccctcgtcagcatggatattcaccgtcgacaatcaacgtgtccccgtccatgcaaaactgtgtaacctgtggtgaatcaatcaaccgaaaaaggaatatgcgatcagcataatcagcgccaaaataatgagtgaaacaaatactatcttgactacccgctgggcctgctcctcctctttcttactatgtgctacttttctcttacttttacccataatgttagctttaaagttcaacgctaacaaagtaaaaacaaatcttttaactttccaaaaataacactcgctaatttttgtttttatgattcctgcgatgaaaattccatcagataggctttgatgaattcctcgattttaccatccatcactccgtttacatccgaagtctgatagttggtacgatggtctttcacgcggcggtcatcgaatacatagctgcgaatctgcgatccccattcgattttcttcttaccggcttccactttcgcctgttctgccatgcggtgctgcaattctttatcgtataagatagagcgcaactggcgcattgcattctcacggttcttcggctggtcacgagtttcggtattctcgataaggatttcctcttcttctcccgtataagggtctttgtactgatagcgcagacgaacgccggattctaccttattaacgttctgaccaccggcaccaccgcttcggaatgtatcccatgaaatgcaggcaggcagaatattcacttcgatactgtcgtccaccaacggagtgacaaacacggaagcaaaagatgtcatgcgcttgccttgcgcattgtacggagaaacacgcaccagacggtgaacgccgttctctcctttcagatagccataagcgaaatctccctcaatattgatggtacaggttttgattcctgcctcatccccttcctgaaggttggcaatagtagccttgtaaccgttcgtttcagcatagcgcagatacatacgcatcagcatagatgcccagtcctgactttccgtaccacccgcaccggagttgattttcaacacacaggccatctggtcggcttcatcacgcagcatattcttgagttcgagtgcttctaccgcttcactggctttcgcataagccgcgtccacatctccctcagtcactaattcttctttataaaaatcgaacgacagttccagttcgtccgccagtgtcttgacttcattatagccgtcaatccacttttgcaggtctttcaccagtttcatctgggcttccgctttcttctggtcatcccagaatcccggcgcctgcgttcttagttgctcttcttcgacttgaattttcttcccgtcgatgtcaaagatacctcctcagcgcatcagtgcgctctttcacgtctttaagttgttcaatagtaatcatgtgatttacaattttatcatttacaatttacaaatttctcttttcggtgcaaaggtaagaaaaattccgctacctttgtttctgtcactaaaatgttgtcacaatatgaacaaactcctgaaactttcatgcttatcgctcttccttgcattagtgatgagcagttgtagctcacaaaagaagtatagctacgagacagtgcccaatgacccgctgaaagcccgcatctacacactggacaacggattaaaagtttacctcaccgtaaacaaggaaactccccgcattcagacattcatcgccgtgcgggtgggcggaaagaacgacccggcagaaacgaccggactggcacactactttgaacacctgatgtttaaaggtaccgacaagtatggcacacaggattatgctgccgaaaaaccactattggaccaaattgaacagcaatttgagatataccgccagacgacggacgaagcagagcgcaaagcgatctaccacaccatcgacagcctctcttacgaagcatccaaatacgccattcccaacgaatatgacaagctgatggctgctatcggttcttccggcagcaacgcctacacatggtatgaccagactgtctatcaggaagatatcccctccaatcagatagagaactgggcaaagattcaggcagaccgcttcgagaataatgtcatccgcggtttccatacggaactggaagctgtatacgaagaaaaaaatatgtctctgacccgggacaacagcaaagtgcaggaggcgatcttctcctctctcttccccaagcatccttatggaacacaaaccgtattgggtacacaggagaatctgaagaacccttccatcaccaatatcaagaattactataaacaatggtacgttcccaataatatggcgatctgtatgtccggagatttagacccggatgaaaccattgccttgatagataaatacttcggaggcttgaagccgaatccggaacttcccaaactgaatctgccgaaagaagatccgatcaccgcacctgtagttaaagaggtattaggtccggatgcggaaagcgttgcactggcatggagattccccggattggccagcaaggatttcgaggttctgcaagttgtttcgcaagtattatacaatggaaaggcaggactcatcgaccttgatctgaaccagcagcagaaggtgctgaacagctacggttacccgatgggactggcagattactcagccttcatattgggcggacttcccaaacagggacaaacgctggaagaagtcaaagacctcttgctgaacgaaataaagaaacttcgtgccggagagttcgatgagaagatgctgcaagctaatatcaacaacttcaagctctacgagctccaaagcatggaaagcaatgaaggacgtgccgacatattcgtcaactcattcattaacggaacaaactgggaggacgaagtaaccgccatcgaccgcatggctaaactgaccaaagaggatatcgtggcctttgccgataaatatctgaaggaggataattatgccgttgtctacaagaaacaaggcaaggacccgaacgagaagaagatgacaaaaccggagattactcccatcgtatccaaccgggatgtggcaagtccattccttacctccatacaggagaatgcagtgaagcccatcgaacctgtattcctcgacttcaagaaagatatgagccagctgacagcgaaatccgatattccggtactctataagcagaatactaccaacgatctcttccaactgatctacgtattcgatatgggtaacaacaacgacaaggcattgggaacggctttcgactaccttgaatatctaggcacttccgacatgacaccggaagaactgaagagcgagttctatcgtctggcgtgtactttctacgtttctccgggcaacgaacgcacctacgtggttctttccggtctgaatgagaatatgccggctgccatgcaactattcgaaaagttactggcagacgcacaagtaaataaggaagcttacaacaatctggtcggagatatactgaaagcccgtgcagatgccaaactgaatcaaggacagaacttctcccgcctgatgaattatgcgatgtacggcccgaagtctcccgccaccaatttactgacggaagcagagctcgccagcatgaatccacaggaactggttgaccggattcataatcagaacaactacaaacatcgtatcctgtattatggccctagcagcagcaaagacctgctggctaccatcgaacaataccaccaggtaccggctactctgaaagatattcctgcaggaaacgaatactcttatcttgaaactccggcgaccaaagtgctggtagctccttacgaagccaaacagatttatatggcgcaaatttccaatcttgataagaaatacgatccggctatagaacctacccgcgaattatataacgaatatttcggcggaggcatgaactccatcgtcttccaggaaatgcgtgaaacacgtggactggcttattccgcatgggcgggtataatgccgccaagctatctgaagtatccatatacgatacgtacccagattgcaactcaaaatgacaagatgattgatgccgtcaatacgttcaacgatattatcaacaatatgccagaatccgaagcagccttcaaattggcaaaagaaggattaatcaaccgcatgcgtaccgaccgcatcatcaaaagcgatattatctggacttatatcaatgcacaggatttgggacaaagcgtagatccgcgcatcaaactctataatgacgtgcagactatgacattgaaagatatcgttgatttccaaaaggaatgggtgaaaggacgcacgtatgtgtattgcatcttgggagacaagaaagacctcgatatgaataagctgaaagcagtaggccctatcgaggaactcactcaggaacaaatcttcggttactaaagtatagtgttctctataaaatagcagatacatagccaattgatacacaaagaacaaacggtgaacagcttgccaaatatgcagcttgttcaccgtttatcgtttatcatcaggccagaccgagaaaagccttattcttcgtacatcttctcaatcagttctttgtagttttcagaaaccactgagcgtttcaacttcaatgtattagtcaattctccacgctccatgctgaaaggttcaggaagtaatgtgaagcgtttgatctgttcataatgcgcaaattgctgttgcaaggtctctattcgtgcacggaacagaccgacaatctttggatgctgcaacagttcggccatatctttatattcgattcctttctccttcgcatagtccttgacaaacccgtacaccggaacaatcaaggcagaaacgaacttgcgctgatctgcgataatagcgatctggtcaatataacggtctatcaccagtttggtttccaatgcttgcggagcaatatatttaccattcgatgtcttaaacaaatccttaatgcgctctgtcaggaataactgcccattcttgaaataaccggcatcgcctgtatggaaccagccgtcagcatcgatagcagcggcagtagcctccgcttttttataatatcctttggttatactttttccacgaagcaggatttcattgtcttcacctatcttcacttccagtcccggcaataccacacctaccgaaccgatatcataacctaccggcaaagtacatgataccgtagccgtagattctgtcagtccatagccgaccaccatgttgattcctaccgaatgaacaaattcattgatttcatcgggcacggctgcaccggctgtcgggaagaaatttccattctcaataccgatcgtcttcttcagcaaagaataaatagtcttctcgtagaacttatatttcagttgattcatcaccggaggggtctttcccaaccggagataatccagattatggattctgccgactttgatggcatccagcatcagcgccttcttcaatcctgtcgtttcattgatcttctcctgtacaccggcatataccttttcccagaaacggggtacgctgcacatcagtgtcgggcgaatttctttaatggttgtctggatatctgccggacgaaggttgatgcagatctgtactcctttatgaatacaaagatagcaccatgccttctcgaatacgtgtgtcaacggaaggaagttcatagaaacgtccttgtcggtcattgtcgtcagacgctcgtcatgcgtatggaactgctccagatagcacgaatgatgcaacattactcccttcggctctcccgtcgtaccggaagtataaaggatgttagccaaatcatcgtaagaagcacgtgcggtacgttcttccaccacctcattatgcggcaatccttcgcccattgccataaactcatcaaaatagatggaagagacatcacgcgggtcttttactaccgaacggtcgaaaataatcagttgttgtaacgaggaacaaaagccgaagatgctgaatgcagaatcatactgatactgttcgcctacaaaaagataacggatttgcgcatcgttgataatgtattgtgcctgtgcgggtgaactcgttgcatagaacggaatagtaaccccacgattggcaaatgcgccgaaatcgacatagaaccattcaggtttattctgtgaaaaaataccgatattctcttgttcctccactcctagcgcaacgaaagcattagcagcctgtcgtacagttccggagaattgattccaggtaatcggaatccattgtgctgtctcatagtcgcggtacctcaatgctaccctgtcgccatacttttcagcctgacggtggaccaagacagataaatgatgataagtcatactctttgtattgataaatatggtacaaaggtattagttttatttgaaactattgcgcaaaacgagtatctttgtgcaaatattaagctctaaattaacaagtttgtatatgaaatacgatattccaaccatgacagccgaagctgtaagcctgttgaaatcactaatcagcattccgtccatcagtcgggaagagacgcaagccgctgatttcctgcaaaattatatcgaagccgaagggatgcagaccggacgcaagggaaacaatgtttggtgcctcagtcctatgttcgaccttaaaaagccgacaatcctgctcaattctcatatcgacacggtaaaacccgtaaatggctggcgcaaagaccctttcacaccccgcgaggaaaacggtaaattatacggattgggcagtaacgacgccggagccagtgttgtttcgctcttacaggtgttcctgcaactatgtcgcacttctcaaaattacaatctcatctatctggcttcctgcgaagaagaagtttcgggtaaggagggaattgaaagtgtattaccggggttaccccctgtttcattcgctatcgtaggcgaacctacggagatgcaacctgccattgccgaaaaggggttgatggtactggatgtaactgctacgggaaaagccggacatgccgcacgcgatgaaggagataatgccatttataaggtattgaacgatatcgcctggttccgtgattatcgtttcgagaaagaatcacctttactcgggccggtaaaaatgagcgttacggtaatcaatgcgggcactcagcacaatgtagttcccgataaatgtacatttgttgttgatatccgaagcaacgaactttactccaacgaagatttatttgcagagatcagaaagcatatagcctgcgatgcgaaagcccgctcgttccgtctcaattcttcacgaattgatgagaaacatccgttcgtacagaaagcggtgaagatgggacgcatacctttcggttccccgactttgtcagatcaggcattgatgtcctttgcatcggtaaagatcggtccgggacgctcttcacgttcacatacagccgaagagtatattatgctgaaagagatagaagaggctatcgggatttatttagatttgttagacggactaaagctttagtccgtctttaccactcatcaagtagaaaatcggctatatgccgatgcttaaccccttcaatattatcttgccataaatcatccatactaaccacatatttaggataatgatcatcaattgccagtaaaggggcaaactcacgatcgatggttgcttgcaagcctagttgataagtaacctgcacatatattttctcttcacgcctaatggctacaaaatcaacttctttttcatcctgtttacctacatatacttcgtatccgcggcgtttcaattccatgcaaaccaaattttcgagcattcccccaattaaccggtcccgataccccatcacagaatagatgagcgaaaggtcactcacaaaatacttttcattagtttgcaaaatttctttgcccttgatgtcataacgtggaatacgttgtatcacaaaagcattatttaaagcatctaaataattgtaaatcgtattgatatccactttccgttgctgacttttaaaatagtcggcaatattcttagcattcaatttgtttcctatattatcaaaaacaaacttcactatcctttcgagcatttctacattacggattccatgccgttgaaccgtatcacgaagaatgacggacgaataaatatcatacacaattttgtaaatagcattataatcatagtttgccgtatgaatagccggaaatccccccattcgaagatatttcaaaaattccgctttacggtcggacgcagaaattgttagcgagagattatggaataacagatattccttaaaagataaagtcataatgtgaaaggcaacgtatcttcctgccaaataagtcgaaaactcggaagatagtaaacgtgaattagaacctgtcacataaatatccacatccaagtcaaccaaaaaggcattcactgccttttcccaatctgtaacttcctgaatctcatccaagagaatataatattttcccgaggctttcgtagtttcctgaatatgagcgtataacgccttcgcctccttcatgtctatccactcgaaactttcaaagttcatataaataatataatcctcagatactcctcttcgtaaaagttcctcactaattaaacgcaacacgaccgacttgccacagcgacgaataccagtgataactttcacaaatggcttatcaataaaaggagtgatttgctccatataaagttcacgattaatcatacaactgaagtttttagggttatagacacaaatataaataattaatcggaagtttttagggttatacccctaaaaacttccgattacaagtatgttttatggttatagacagaaacgacaatagcatttatgaaaaaaggggcacctcctgtatctttatctaaaataagaaatttagccaccatcataataacggtggctaaatcaaagaaaaacaaccagtttcaatggtctattcaatccatcccggatttacaaagagcatagacaaaaaagtttacccgattcatattatatatcaaatcagacatttccatgcgatccactattgctcattttgttaagatactgtttccatatcaaaaaggcaattatgcctaacagattaaataacaaaaccaaaatgacccataaatatttatatggtttagtaagttgatgacttttcaacacggccaatatcccaatcaacaaaatcagaacataaacaatttcaaaaaacattggaggcataatcataatttttattctcaataatcattaatatgcagaaactgtaacacttccctttcccgcactcttatcgtatgtccctgaagaattaataacataagaaaggttaaagccaacaaactgagttatagttgccttaattttccccgtactattaaatgatatagaatttcctgatacatagccattcgcataagattgagaatacgtataaactgataatcctactctttataaagtcagcgaattgtattgttactcttttattcatcgtatcttattttaaacactgcaaaaataaaacatccccattcattatacaaatccattaacaggctgttttatttgaaactaccaataatatgatataaaccattcctactatcgccctaatataagaaacgaaaccaggcttcatcttttttgcaattacttcatttataaatgagccgatccctaaaacggcacatatcccgacaaaaataaaaaccaccagccttgtccaataaatatgagtcaatatattctcaccattatatatacacatacctaaaaagacaatagcgattaaatatgtcagatcaaaaataaggactttcatactattgcttatttacttacctttggcctacattggaattataaaataggctaaagcaagaagtattatagatataacgtatcctatcttccaacatttactatgtcgaaataaataattaagtataaacaaaacaatgagccaaccaaatactattttatttaaatcataatgtttctccaaagggtcccaaatgtaaagatacacatttagggaaaacataataagaccgattatcccaataattatgcggctcattaaactagcttttcctgtttcattcataacatcaaattttatattcatgtctaataatctgtaaagtgcactttcactatatcacgctgttttctattccattttcaatattatattatcattctcctccttcagcatttttttcaaccgattataggtatcaagttttcgattccacatatccggactatcatcgacatgtgtcaatgctattgtatctaacagagatttatggctttcttctgtgtcaggcagcgtagcctcatcaaactccgcaaattccacctctatttcatctcctacttcaagcgtacctccattccatgtaacatgaacatctccaggcattttcaaaccacccacgttccagtaagcaccctcataacgtgtaatatttaccatcaagctaaccccgttatcagggatgcccgctttacaaacctcattccctcgttttataatcaatcctttcatatcttctatatcagtcctttttcttgcagttcaacctttaaccgttcataccactgctttatttcatacctatcacagtccttcatggtcaaaactggtgccaccttatcagtgtcaacaattctaattaataccttatcaccaacttcaggtcttccgtcgaaccaggtaaggtaatgtaaaagatcacttcccattaccataatccgatcggaagaatatccatgtaataagtttacaaaaaccaaattatcagaagccacagtaatcggatcttcatcatttatgcgtatttctaaaccgatcatatcttttatttattacaagatttaatcaataatagactttcttgttttctctggaaagtaccaaataatcgtccacttttacatcaaaataagacttagctttaccgtcatcattggaaggcaactcctctttatcagtcagcgcctctattatatcgatttccttcacgttctttttcaatttggggaacaacaggctgacatatatgtatttacgattgcaacctttaataatcatcaacttatccataggtgcgccaccatcgtatcctctcaccatgtattcatcaccggttttcttatctactattttaaatcccgggctatagtacatccattgccagtcgaaatagatgggttgcaggaacgttactttagtatcatctttccttctttcaatagaatgcaataaaggctttgtacccatgccatgctcataggttctatcggcaacgatctctatgctatctttaggagctgtataagccgcatcaaataacttttgatcgcgtgtcttggcctgttcggcagcgtcatcccttaccaactctcttgatttctgaagcttcggcatcatttcctgcaccatttccattgacagctgttgtatcatcggcattgattcagttgcaacggcagttgcagtctccccaagttttcttcccgcaggagattcataaaaagcaaccacttttttcagttcatctaatgtcatgtgttgctggtaaataggagcatatacttccattactttatcttcaatcttccgtgtccattttgaagcaaaatctttccaataagcctcatcttgttggaaaggcccatttttcatactcgacatcaattgagacattatagcttcagaggatgccgaactgccggaaagcgtcatgatcttttttagtaaagttttgtactcgtcggtctggtctgaattctgagccgaagccggtaaaatagaagtaagcgatgtggctacgcagatcaccattaagaaaaggatttttttcatcatataatagttttgttgatgaagtcaagttaacttcattgtgttatacattcttacaaatatactctaattattattagaatacaaacaaataacggacataattataaactgcggcaattattgtctgatttaccgtttctcttcgtccaagcaaccctataatcgcttaattttcacttattgttatcagtttttcgtaag
